(19) United States
(12) Patent Application Publication
(10) Pub. No.: US 2019/0249172 A1
(43) Pub. Date: Aug. 15, 2019

(54) METHODS AND COMPOSITIONS FOR GENE EDITING IN STEM CELLS

(71) Applicant: The Regents of the University of California

(72) Inventors: Donald B. Kohn, Tarzana, CA (US); Carmen Flores Bjurstroem, Los Angeles, CA (US)

(73) Assignees: The Regents of the University of California, Oakland, CA (US); The Regents of the University of California, Oakland, CA (US)

(21) Appl. No.: 16/077,982

(22) PCT Filed: Feb. 16, 2017
(86) PCT No.: PCT/US17/18183

§ 371 Date: Aug. 14, 2018

(51) Int. Cl. C12N 15/11; C12N 9/22; C07K 14/47

(52) U.S. Cl. CPC C12N 15/11; C12N 9/22; C12N 2800/80; C12N 2310/20; C07K 14/4747

(57) ABSTRACT

The present disclosure provides methods for gene editing in stem cells. The methods generally involve modifying the stem cells by increasing the level of an apoptosis regulator in the stem cells; and introducing into the modified stem cells a genome editing composition.

### CROSS-REFERENCE TO RELATED APPLICATIONS

[0001] This application claims priority to and benefit of U.S. Ser. No. 62/297,039, filed on Feb. 18, 2016, which is incorporated herein by reference in its entirety for all purposes.

### INCORPORATION BY REFERENCE OF SEQUENCE LISTING PROVIDED AS A TEXT FILE

[0002] A Sequence Listing is provided herewith as a text file, “UCLA-149PRV_SeqList_ST25.txt” created on Feb. 18, 2016 and having a size of 7,893 KB. The contents of the text file are incorporated by reference herein in their entirety.

### BACKGROUND

[0003] RNA-mediated adaptive immune systems in bacteria and archaea rely on Clustered Regularly Interspaced Short Palindromic Repeat (CRISPR) genomic loci and CRISPR-associated (Cas) proteins that function together to provide protection from invading viruses and plasmids. In Type II CRISPR-Cas systems, the Cas9 protein functions as an RNA-guided endonuclease that uses a dual-guide RNA consisting of crRNA and trans-activating crRNA (tracrRNA) for target recognition and cleavage by a mechanism involving two nuclease active sites that together generate double-stranded DNA breaks (DSBs).

[0004] RNA-programmed Cas9 has proven to be a versatile tool for genome engineering in multiple cell types and organisms. Guided by a dual-RNA complex or a chimeric single-guide RNA, Cas9 (or variants of Cas9 such as nickase variants) can generate site-specific DSBs or single-stranded breaks (SSBs) within target nucleic acids. Target nucleic acids can include double-stranded DNA (dsDNA) and single-stranded DNA (ssDNA) as well as RNA. When cleavage of a target nucleic acid occurs within a cell (e.g., a eukaryotic cell), the break in the target nucleic acid can be repaired by non-homologous end joining (NHEJ) or HDR.

[0005] Disruption of mammalian genes holds great promise for fundamental discovery, treatment of genetic diseases, and prophylactic treatment. Gene knockouts can be generated using a genome editing endonuclease (e.g., a zinc finger nuclease (ZFN), a transcription activator-like effector nuclease (TALEN), a CRISPR/Cas protein:guide RNA, and the like) to introduce a site specific double strand break (DSB) within a locus (e.g., gene) of interest. Clones can be screened for those in which one or more alleles have been repaired in an error-prone fashion that disrupts the open reading frame.

[0006] Gene correction can be achieved in stem cells (e.g., CD34⁺ stem cells) and progenitor cells; nevertheless, levels of homology-directed repair (HDR)-mediated gene modification in long-term reconstituting stem cells, such as hematopoietic stem cells (HSCs), remain low.

### SUMMARY

[0007] The present disclosure provides, inter alia, compositions and methods for gene editing in stem cells. The methods generally involve modifying the stem cells by increasing the level of an apoptosis regulator in the stem cells; and introducing into the modified stem cells a genome editing composition.

[0008] Various embodiments contemplated herein may include, but need not be limited to, one or more of the following:

### Embodiment 1

[0009] A method of editing a target genomic DNA in a mammalian stem cell, the method comprising:

[0010] a) overexpressing an apoptosis regulator in the cell, generating a modified mammalian stem cell that overexpresses the apoptosis regulator; and

[0011] b) contacting the modified mammalian stem cell with a genome targeting composition comprising a genome editing endonuclease, or a nucleic acid encoding the genome editing endonuclease, wherein the genome editing endonuclease cleaves within a desired target sequence of the genomic DNA of the cell, wherein the genome-editing endonuclease enters the modified stem cell and edits the target genomic DNA.

### Embodiment 2

[0012] The method of embodiment 1, wherein the modification of the genomic DNA is an insertion of a sequence into the genomic DNA and/or a deletion of sequence from the genomic DNA, or where the modification of the genomic DNA is a substitution of one or more nucleotides of the target genomic DNA.

### Embodiment 3

[0013] The method of embodiment 1 or embodiment 2, wherein the genome targeting composition comprises a zinc finger nuclease.

### Embodiment 4

[0014] The method of embodiment 1 or embodiment 2, wherein the genome targeting composition comprises a TAL-effector DNA binding domain-nuclease fusion protein (TALEN).

### Embodiment 5

[0015] The method of embodiment 1 or embodiment 2, wherein the genome targeting composition comprises a ribonucleoprotein (RNP) complex comprising a class 2 CRISPR/Cas endonuclease complexed with a corresponding CRISPR/Cas guide RNA that hybridizes to a target sequence within the genomic DNA of the cell.

### Embodiment 6

[0016] The method of embodiment 5, wherein the genome targeting composition comprises: (i) a nucleic acid encoding a class 2 CRISPR/Cas endonuclease, and (ii) a corresponding CRISPR/Cas guide RNA, or a nucleic acid encoding the corresponding CRISPR/Cas guide RNA, wherein the CRISPR/Cas guide RNA hybridizes to a target sequence within the genomic DNA of the cell.

### Embodiment 7

[0017] The method of embodiment 5 or embodiment 6, wherein the class 2 CRISPR/Cas endonuclease is a type II CRISPR/Cas endonuclease.

### Embodiment 8

[0018] The method of embodiment 5 or embodiment 6, wherein the class 2 CRISPR/Cas endonuclease is a Cas9 polypeptide and the corresponding CRISPR/Cas guide RNA is a Cas9 guide RNA.

### Embodiment 9

[0019] The method of embodiment 5 or embodiment 6, wherein the class 2 CRISPR/Cas endonuclease is a type V or type VI CRISPR/Cas endonuclease.

### Embodiment 10

[0020] The method of embodiment 5 or embodiment 6, wherein the class 2 CRISPR/Cas polypeptide is a Cpf1 polypeptide, a C2c1 polypeptide, a C2c3 polypeptide, or a C2c2 polypeptide.

### Embodiment 11

[0021] The method of any one of embodiments 5-10, wherein the genome targeting composition comprises a donor template nucleic acid.

### Embodiment 12

[0022] The method of any one of embodiments 1-11, wherein the apoptosis regulator is Bcl-2, a caspase-9-DN mutant, baculovirus p35, caspase-9S, crmA, z-VAD-fmk, z-DEVD-fmk, B-D-fmk, z-YVAD-fmk, Bcl-xL, Mcl-1, XIAP, TIAP, KIAP, NAIP, cIAP1, cIAP2, API1, API2, API3, API4, HIAP1, HIAP2, MIHA, MIHB, MIHC, ILP, ILP-2, TLAP, survivin, livin, apollon, BRUCE, MLIAP, SODD, or FLIP.

### Embodiment 13

[0023] The method of any one of embodiments 1-11, wherein the apoptosis regulator is a Bcl-2 polypeptide.

### Embodiment 14

[0024] The method of embodiment 13, wherein the Bcl-2 polypeptide comprises an amino acid sequence having at least 85% amino acid sequence identity to the amino acid sequence set forth in FIG. 1A or FIG. 1B.

### Embodiment 15

[0025] The method of any one of embodiments 1-14, wherein the mammalian stem cell is a pluripotent stem cell or an adult stem cell.

### Embodiment 16

[0026] The method of any one of embodiments 1-14, wherein the mammalian stem cell is a hematopoietic stem cell, an embryonic stem cell, a neural stem cell, a hematopoietic stem cell, a mesenchymal stem cell, or an induced pluripotent stem cell.

### Embodiment 17

[0027] The method of any one of embodiments 1-14, wherein the mammalian stem cell is a hematopoietic stem cell.

### Embodiment 18

[0028] The method of any one of embodiments 17, wherein the apoptosis regulator is transiently overexpressed.

### Embodiment 19

[0029] The method of embodiment 18, wherein the apoptosis regulator is overexpressed for a period of time of from about 1 hour to about 48 hours.

### Embodiment 20

[0030] The method of embodiment 18, wherein the apoptosis regulator is overexpressed for a period of time of from about 48 hours to about 72 hours.

### Embodiment 21

[0031] The method of any one of embodiments 1-20, wherein the apoptosis regulator is overexpressed by at least 50% over background.

### Embodiment 22

[0032] A method of editing a target genomic DNA of a mammalian stem cell, the method comprising: a) overexpressing an apoptosis regulator in the cell, generating a modified mammalian stem cell that overexpresses the apoptosis regulator; and b) contacting the modified mammalian stem cell with a ribonucleoprotein (RNP) complex comprising a class 2 CRISPR/Cas endonuclease complexed with a corresponding CRISPR/Cas guide RNA that hybridizes to a target sequence within the genomic DNA of the cell, wherein the class 2 CRISPR/Cas endonuclease cleaves the genomic DNA, resulting in editing of the target genomic DNA.

### Embodiment 23

[0033] The method of embodiment 22, wherein the class 2 CRISPR/Cas endonuclease is a type II CRISPR/Cas endonuclease.

### Embodiment 24

[0034] The method of embodiment 22, wherein the class 2 CRISPR/Cas endonuclease is a Cas9 polypeptide and the corresponding CRISPR/Cas guide RNA is a Cas9 guide RNA.

### Embodiment 25

[0035] The method of embodiment 24, wherein the Cas9 guide RNA is a single guide RNA (sgRNA).

### Embodiment 26

[0036] The method of embodiment 22, wherein the class 2 CRISPR/Cas endonuclease is a type V or type VI CRISPR/Cas endonuclease.

### Embodiment 27

[0037] The method of embodiment 22, wherein the class 2 CRISPR/Cas polypeptide is a Cpf1 polypeptide, a C2c1 polypeptide, a C2c3 polypeptide, or a C2c2 polypeptide.

### Embodiment 28

[0038] The method of any one of embodiments 22-27, wherein the RNP complex is present in a composition that comprises a donor template nucleic acid.

### Embodiment 29

[0039] The method of any one of 22-28, wherein the apoptosis regulator is Bcl-2, a caspase-9-DN mutant, baculovirus p35, caspase-9S, crmA, z-VAD-fmk, z-DEVD-fmk, B-D-fmk, z-YVAD-fmk, Bcl-xL, Mcl-1, XIAP, TIAP, KIAP, NAIP, cIAP1, cIAP2, API1, API2, API3, API4, HIAP1, HIAP2, MIHA, MIHB, MIHC, ILP, ILP-2, TLAP, survivin, livin, apollon, BRUCE, MLIAP, SODD, or FLIP.

### Embodiment 30

[0040] The method of any one of embodiments 22-28, wherein the apoptosis regulator is a Bcl-2 polypeptide.

### Embodiment 31

[0041] The method of embodiment 30, wherein the Bcl-2 polypeptide comprises an amino acid sequence having at least 85% amino acid sequence identity to the amino acid sequence set forth in FIG. 1A or FIG. 1B.

### Embodiment 32

[0042] The method of any one of embodiments 22-31, wherein the mammalian stem cell is a pluripotent stem cell or an adult stem cell.

### Embodiment 33

[0043] The method of any one of embodiments 22-31, wherein the mammalian stem cell is a hematopoietic stem cell, an embryonic stem cell, a neural stem cell, a hematopoietic stem cell, a mesenchymal stem cell, or an induced pluripotent stem cell.

### Embodiment 34

[0044] The method of any one of embodiments 22-31, wherein the mammalian stem cell is a hematopoietic stem cell.

### Embodiment 35

[0045] The method of any one of embodiments 34, wherein the apoptosis regulator is transiently overexpressed.

### Embodiment 36

[0046] The method of embodiment 35, wherein the apoptosis regulator is overexpressed for a period of time of from about 1 hour to about 48 hours.

### Embodiment 37

[0047] The method of embodiment 35, wherein the apoptosis regulator is overexpressed for a period of time of from about 48 hours to about 72 hours.

### Embodiment 38

[0048] The method of any one of embodiments 22-37, wherein the apoptosis regulator is overexpressed by at least 50% over background.

### BRIEF DESCRIPTION OF THE DRAWINGS

[0049] FIGS. 1A and 1B provide amino acid sequences of Bcl-2 alpha (FIG. 1A) (SEQ ID NO: 1142) and Bcl-2 beta (FIG. 1B) (SEQ ID NO: 1143).

[0050] FIG. 2 provides an amino acid sequence of Mcl-1 (SEQ ID NO: 1144).

[0051] FIG. 3 provides an amino acid sequence of survivin (SEQ ID NO:1145).

[0052] FIG. 4 provides an amino acid sequence of XIAP (SEQ ID NO: 1146).

[0053] FIG. 5 provides an amino acid sequence of cIAP1 (SEQ ID NO: 1147).

[0054] FIG. 6 provides an amino acid sequence of Bcl-xL (SEQ ID NO: 1148).

[0055] FIG. 7 provides a schematic depiction of the experimental design, and immunophenotype-defined populations.

[0056] FIG. 8 provides a HDR vs. NHEJ comparison in various cell populations.

[0057] FIG. 9 depicts cell death and apoptosis analysis of various cell populations post-electroporation.

[0058] FIGS. 10A-10C depict the effect of transient overexpression of BCL-2 mRNA on cell toxicity as measured by flow cytometry and on the number of cells overall.

[0059] FIG. 11 depicts the effect of transient overexpression of BCL-2 mRNA on gene modification levels in HSC, MPP, and progenitor cells treated with ZFN mRNA and an oligonucleotide donor.

[0060] FIGS. 12A-12B depict apoptosis pathway gene expression analysis by qPCR in human HSCs, MPPs and progenitor cells.

[0061] FIGS. 13A-13D depict xenograft transplantations of female immune-deficient NSG mice.

### DEFINITIONS

[0062] By “site-directed modifying polypeptide” or “site-directed DNA modifying polypeptide” or “site-directed target nucleic acid modifying polypeptide” or “RNA-binding site-directed polypeptide” or “RNA-binding site-directed modifying polypeptide” or “site-directed polypeptide” it is meant a polypeptide that binds a guide RNA and is targeted to a specific DNA sequence by the guide RNA. A site-directed modifying polypeptide can be class 2 CRISPR/Cas protein (e.g., a type II CRISPR/Cas protein, a type V CRISPR/Cas protein, a type VI CRISPR/Cas protein). An example of a type II CRISPR/Cas protein is a Cas9 protein (“Cas9 polypeptide”). Examples of type V CRISPR/Cas proteins are Cpf1, C2c1, and C2c3. An example of a type II CRISPR/Cas protein is a C2c2 protein. Class 2 CRISPR/Cas proteins (e.g., Cas9, Cpf1, C2c1, C2c2, and C2c3) as described herein are targeted to a specific DNA sequence by the RNA (a guide RNA) to which it is bound. The guide RNA comprises a sequence that is complementary to a target sequence within the target DNA, thus targeting the bound CRISPR/Cas protein to a specific location within the target DNA (the target sequence). For example, a Cpf1 polypeptide as described herein is targeted to a specific DNA sequence by the RNA (a guide RNA) to which it is bound. The guide RNA comprises a sequence that is complementary to a target sequence within the target DNA, thus targeting the bound Cpf1 protein to a specific location within the target DNA (the target sequence).

[0063] “Heterologous,” as used herein, means a nucleotide or polypeptide sequence that is not found in the native nucleic acid or protein, respectively.

[0064] The terms “polynucleotide” and “nucleic acid,” used interchangeably herein, refer to a polymeric form of nucleotides of any length, either ribonucleotides or deoxynucleotides. Thus, this term includes, but is not limited to, single-, double-, or multi-stranded DNA or RNA, genomic DNA, cDNA, DNA-RNA hybrids, or a polymer comprising purine and pyrimidine bases or other natural, chemically or biochemically modified, non-natural, or derivatized nucleotide bases. The terms “polynucleotide” and “nucleic acid” should be understood to include, as applicable to the embodiment being described, single-stranded (such as sense or antisense) and double-stranded polynucleotides.

[0065] The term “naturally-occurring” as used herein as applied to a nucleic acid, a cell, or an organism, refers to a nucleic acid, cell, or organism that is found in nature. For example, a polypeptide or polynucleotide sequence that is present in an organism (including viruses) that can be isolated from a source in nature and which has not been intentionally modified by a human in the laboratory is naturally occurring.

[0066] As used herein the term “isolated” is meant to describe a polynucleotide, a polypeptide, or a cell that is in an environment different from that in which the polynucleotide, the polypeptide, or the cell naturally occurs. An isolated genetically modified host cell may be present in a mixed population of genetically modified host cells.

[0067] As used herein, the term “exogenous nucleic acid” refers to a nucleic acid that is not normally or naturally found in and/or produced by a given cell in nature. As used herein, the term “endogenous nucleic acid” refers to a nucleic acid that is normally found in and/or produced by a given cell in nature. An “endogenous nucleic acid” is also referred to as a “native nucleic acid” or a nucleic acid that is “native” to a given cell.

[0068] “Recombinant,” as used herein, means that a particular nucleic acid (DNA or RNA) is the product of various combinations of cloning, restriction, and/or ligation steps resulting in a construct having a structural coding or non-coding sequence distinguishable from endogenous nucleic acids found in natural systems. Generally, DNA sequences encoding the structural coding sequence can be assembled from cDNA fragments and short oligonucleotide linkers, or from a series of synthetic oligonucleotides, to provide a synthetic nucleic acid which is capable of being expressed from a recombinant transcriptional unit contained in a cell or in a cell-free transcription and translation system. Such sequences can be provided in the form of an open reading frame uninterrupted by internal non-translated sequences, or introns, which are typically present in eukaryotic genes. Genomic DNA comprising the relevant sequences can also be used in the formation of a recombinant gene or transcriptional unit. Sequences of non-translated DNA may be present 5′ or 3′ from the open reading frame, where such sequences do not interfere with manipulation or expression of the coding regions, and may indeed act to modulate production of a desired product by various mechanisms (see “DNA regulatory sequences”, below).

[0069] Thus, e.g., the term “recombinant” polynucleotide or “recombinant” nucleic acid refers to one which is not naturally occurring, e.g., is made by the artificial combination of two otherwise separated segments of sequence through human intervention. This artificial combination is often accomplished by either chemical synthesis means, or by the artificial manipulation of isolated segments of nucleic acids, e.g., by genetic engineering techniques. Such can be done to replace a codon with a redundant codon encoding the same or a conservative amino acid, while typically introducing or removing a sequence recognition site. It can also be performed to join together nucleic acid segments of desired functions to generate a desired combination of functions. This artificial combination is often accomplished by either chemical synthesis means, or by the artificial manipulation of isolated segments of nucleic acids, e.g., by genetic engineering techniques.

[0070] Similarly, the term “recombinant” polypeptide refers to a polypeptide which is not naturally occurring, e.g., is made by the artificial combination of two otherwise separated segments of amino sequence through human intervention. Thus, e.g., a polypeptide that comprises a heterologous amino acid sequence is recombinant.

[0071] By “recombination” it is meant a process of exchange of genetic information between two polynucleotides. As used herein, “homology-directed repair (HDR)” refers to the specialized form DNA repair that takes place, for example, during repair of double-strand breaks in cells. This process requires nucleotide sequence homology, uses a “donor” molecule to template repair of a “target” molecule (i.e., the one that experienced the double-strand break), and leads to the transfer of genetic information from the donor to the target. Homology-directed repair may result in an alteration of the sequence of the target molecule (e.g., insertion, deletion, mutation), if the donor polynucleotide differs from the target molecule and part or all of the sequence of the donor polynucleotide is incorporated into the target DNA. In some embodiments, the donor polynucleotide, a portion of the donor polynucleotide, a copy of the donor polynucleotide, or a portion of a copy of the donor polynucleotide integrates into the target DNA.

[0072] By “non-homologous end joining (NHEJ)” it is meant the repair of double-strand breaks in DNA by direct ligation of the break ends to one another without the need for a homologous template (in contrast to homology-directed repair, which requires a homologous sequence to guide repair). NHEJ often results in the loss (deletion) of nucleotide sequence near the site of the double-strand break.

[0073] By “construct” or “vector” is meant a recombinant nucleic acid, generally recombinant DNA, which has been generated for the purpose of the expression and/or propagation of a specific nucleotide sequence(s), or is to be used in the construction of other recombinant nucleotide sequences.

[0074] The terms “DNA regulatory sequences,” “control elements,” and “regulatory elements,” used interchangeably herein, refer to transcriptional and translational control sequences, such as promoters, enhancers, polyadenylation signals, terminators, protein degradation signals, and the like, that provide for and/or regulate expression of a coding sequence and/or production of an encoded polypeptide in a host cell.

[0075] The term “transformation” is used interchangeably herein with “genetic modification” and refers to a permanent or transient genetic change induced in a cell following introduction of new nucleic acid (i.e., DNA exogenous to the cell). Genetic change (“modification”) can be accomplished either by incorporation of the new DNA into the genome of the host cell, or by transient or stable maintenance of the new DNA as an episomal element. Where the cell is a eukaryotic cell, a permanent genetic change is generally achieved by introduction of the DNA into the genome of the cell.

[0076] “Operably linked” refers to a juxtaposition wherein the components so described are in a relationship permitting them to function in their intended manner. For instance, a promoter is operably linked to a coding sequence if the promoter affects its transcription or expression. As used herein, the terms “heterologous promoter” and “heterologous control regions” refer to promoters and other control regions that are not normally associated with a particular nucleic acid in nature. For example, a “transcriptional control region heterologous to a coding region” is a transcriptional control region that is not normally associated with the coding region in nature.

[0077] A “host cell,” as used herein, denotes an in vivo or in vitro eukaryotic cell, or a cell from a multicellular organism (e.g., a cell line) cultured as a unicellular entity, which eukaryotic cells can be, or have been, used as recipients for a nucleic acid (e.g., a donor template nucleic acid), and include the progeny of the original cell which has been genetically modified by the nucleic acid. It is understood that the progeny of a single cell may not necessarily be completely identical in morphology or in genomic or total DNA complement as the original parent, due to natural, accidental, or deliberate mutation. A “recombinant host cell” (also referred to as a “genetically modified host cell”) is a host cell into which has been introduced a heterologous nucleic acid, e.g., an expression vector. For example, a eukaryotic host cell is a genetically modified eukaryotic host cell, by virtue of introduction into a suitable eukaryotic host cell of a heterologous nucleic acid, e.g., an exogenous nucleic acid that is foreign to the eukaryotic host cell, or a recombinant nucleic acid that is not normally found in the eukaryotic host cell.

[0078] The term “stem cell” is used herein to refer to a cell (e.g., plant stem cell, vertebrate stem cell) that has the ability both to self-renew and to generate a differentiated cell type (see Morrison et al. (1997) Cell 88:287-298). In the context of cell ontogeny, the adjective “differentiated”, or “differentiating” is a relative term. A “differentiated cell” is a cell that has progressed further down the developmental pathway than the cell it is being compared with. Thus, pluripotent stem cells (described below) can differentiate into lineage-restricted progenitor cells (e.g., mesodermal stem cells), which in turn can differentiate into cells that are further restricted (e.g., neuron progenitors), which can differentiate into end-stage cells (i.e., terminally differentiated cells, e.g., neurons, cardiomyocytes, etc.), which play a characteristic role in a certain tissue type, and may or may not retain the capacity to proliferate further. Stem cells may be characterized by both the presence of specific markers (e.g., proteins, RNAs, etc.) and the absence of specific markers. Stem cells may also be identified by functional assays both in vitro and in vivo, particularly assays relating to the ability of stem cells to give rise to multiple differentiated progeny.

[0079] Stem cells of interest include pluripotent stem cells (PSCs). The term “pluripotent stem cell” or “PSC” is used herein to mean a stem cell capable of producing all cell types of the organism. Therefore, a PSC can give rise to cells of all germ layers of the organism (e.g., the endoderm, mesoderm, and ectoderm of a vertebrate). Pluripotent cells are capable of forming teratomas and of contributing to ectoderm, mesoderm, or endoderm tissues in a living organism. Pluripotent stem cells of plants are capable of giving rise to all cell types of the plant (e.g., cells of the root, stem, leaves, etc.).

[0080] PSCs of animals can be derived in a number of different ways. For example, embryonic stem cells (ESCs) are derived from the inner cell mass of an embryo (Thomson et. al, Science. 1998 Nov. 6; 282(5391): 1145-7) whereas induced pluripotent stem cells (iPSCs) are derived from somatic cells (Takahashi et. al, Cell. 2007 Nov. 30; 131(5):861-72; Takahashi et. al, Nat Protoc. 2007; 2(12):3081-9; Yu et. al, Science. 2007 Dec. 21; 318(5858):1917-20. Epub 2007 Nov. 20). Because the term PSC refers to pluripotent stem cells regardless of their derivation, the term PSC encompasses the terms ESC and iPSC, as well as the term embryonic germ stem cells (EGSC), which are another example of a PSC. PSCs may be in the form of an established cell line, they may be obtained directly from primary embryonic tissue, or they may be derived from a somatic cell. PSCs can be target cells of the methods described herein.

[0081] By “embryonic stem cell” (ESC) is meant a PSC that was isolated from an embryo, typically from the inner cell mass of the blastocyst. ESC lines are listed in the NIH Human Embryonic Stem Cell Registry, e.g., hESBGN-01, hESBGN-02, hESBGN-03, hESBGN-04 (BresaGen, Inc.); HES-1, HES-2, HES-3, HES-4, HES-5, HES-6 (ES Cell International); Miz-hES1 (MizMedi Hospital-Seoul National University); HSF-1, HSF-6 (University of California at San Francisco); and H1, H7, H9, H13, H14 (Wisconsin Alumni Research Foundation (WiCell Research Institute)). Stem cells of interest also include embryonic stem cells from other primates, such as Rhesus stem cells and marmoset stem cells. The stem cells may be obtained from any mammalian species, e.g., human, equine, bovine, porcine, canine, feline, rodent, e.g., mice, rats, hamster, primate, etc. (Thomson et al. (1998) Science 282:1145; Thomson et al. (1995) Proc. Natl. Acad. Sci USA 92:7844; Thomson et al. (1996) Biol. Reprod. 55:254; Shamblott et al., Proc. Natl. Acad. Sci. USA 95:13726, 1998). In culture, ESCs typically grow as flat colonies with large nucleo-cytoplasmic ratios, defined borders and prominent nucleoli. In addition, ESCs express SSEA-3, SSEA-4, TRA-1-60, TRA-1-81, and Alkaline Phosphatase, but not SSEA-1. Examples of methods of generating and characterizing ESCs may be found in, for example, U.S. Pat. Nos. 7,029,913, 5,843,780, and 6,200,806, the disclosures of which are incorporated herein by reference. Methods for proliferating hESCs in the undifferentiated form are described in WO 99/20741, WO 01/51616, and WO 03/020920.

[0082] By “embryonic germ stem cell” (EGSC) or “embryonic germ cell” or “EG cell” is meant a PSC that is derived from germ cells and/or germ cell progenitors, e.g., primordial germ cells, i.e. those that would become sperm and eggs. Embryonic germ cells (EG cells) are thought to have properties similar to embryonic stem cells as described above. Examples of methods of generating and characterizing EG cells may be found in, for example, U.S. Pat. No. 7,153,684; Matsui, Y., et al., (1992) Cell 70:841; Shamblott, M., et al. (2001) Proc. Natl. Acad. Sci. USA 98: 113; Shamblott, M., et al. (1998) Proc. Natl. Acad. Sci. USA, 95:13726; and Koshimizu, U., et al. (1996) Development, 122:1235, the disclosures of which are incorporated herein by reference.

[0083] By “induced pluripotent stem cell” or “iPSC” it is meant a PSC that is derived from a cell that is not a PSC (i.e., from a cell this is differentiated relative to a PSC). iPSCs can be derived from multiple different cell types, including terminally differentiated cells. iPSCs have an ES cell-like morphology, growing as flat colonies with large nucleo-cytoplasmic ratios, defined borders and prominent nuclei. In addition, iPSCs express one or more key pluripotency markers known by one of ordinary skill in the art, including but not limited to Alkaline Phosphatase, SSEA3, SSEA4, Sox2, Oct3/4, Nanog, TRA160, TRA181, TDGF 1, Dnmt3b, FoxD3, GDF3, Cyp26a1, TERT, and zfp42. Examples of methods of generating and characterizing iPSCs may be found in, for example, U.S. Patent Publication Nos. US20090047263, US20090068742, US20090191159, US20090227032, US20090246875, and US20090304646, the disclosures of which are incorporated herein by reference. Generally, to generate iPSCs, somatic cells are provided with reprogramming factors (e.g., Oct4, SOX2, KLF4, MYC, Nanog, Lin28, etc.) known in the art to reprogram the somatic cells to become pluripotent stem cells.

[0084] By “somatic cell” it is meant any cell in an organism that, in the absence of experimental manipulation, does not ordinarily give rise to all types of cells in an organism. In other words, somatic cells are cells that have differentiated sufficiently that they will not naturally generate cells of all three germ layers of the body, i.e. ectoderm, mesoderm and endoderm. For example, somatic cells would include both neurons and neural progenitors, the latter of which may be able to naturally give rise to all or some cell types of the central nervous system but cannot give rise to cells of the mesoderm or endoderm lineages.

[0085] The term “conservative amino acid substitution” refers to the interchangeability in proteins of amino acid residues having similar side chains. For example, a group of amino acids having aliphatic side chains consists of glycine, alanine, valine, leucine, and isoleucine; a group of amino acids having aliphatic-hydroxyl side chains consists of serine and threonine; a group of amino acids having amide-containing side chains consists of asparagine and glutamine; a group of amino acids having aromatic side chains consists of phenylalanine, tyrosine, and tryptophan; a group of amino acids having basic side chains consists of lysine, arginine, and histidine; and a group of amino acids having sulfur-containing side chains consists of cysteine and methionine. Exemplary conservative amino acid substitution groups are: valine-leucine-isoleucine, phenylalanine-tyrosine, lysine-arginine, alanine-valine, and asparagine-glutamine.

[0086] A polynucleotide or polypeptide has a certain percent “sequence identity” to another polynucleotide or polypeptide, meaning that, when aligned, that percentage of bases or amino acids are the same, and in the same relative position, when comparing the two sequences. Sequence similarity can be determined in a number of different manners. To determine sequence identity, sequences can be aligned using the methods and computer programs, including BLAST, available over the world wide web at ncbi.nlm.nih.gov/BLAST. See, e.g., Altschul et al. (1990), J. Mol. Biol. 215:403-10. Another alignment algorithm is FASTA, available in the Genetics Computing Group (GCG) package, from Madison, Wis., USA, a wholly owned subsidiary of Oxford Molecular Group, Inc. Other techniques for alignment are described in Methods in Enzymology, vol. 266: Computer Methods for Macromolecular Sequence Analysis (1996), ed. Doolittle, Academic Press, Inc., a division of Harcourt Brace & Co., San Diego, Calif., USA. Of particular interest are alignment programs that permit gaps in the sequence. The Smith-Waterman is one type of algorithm that permits gaps in sequence alignments. See Meth. Mol. Biol. 70: 173-187 (1997). Also, the GAP program using the Needleman and Wunsch alignment method can be utilized to align sequences. See J. Mol. Biol. 48: 443-453 (1970).

[0087] Before the present invention is further described, it is to be understood that this invention is not limited to particular embodiments described, as such may, of course, vary. It is also to be understood that the terminology used herein is for the purpose of describing particular embodiments only, and is not intended to be limiting, since the scope of the present invention will be limited only by the appended claims.

[0088] Where a range of values is provided, it is understood that each intervening value, to the tenth of the unit of the lower limit unless the context clearly dictates otherwise, between the upper and lower limit of that range and any other stated or intervening value in that stated range, is encompassed within the invention. The upper and lower limits of these smaller ranges may independently be included in the smaller ranges, and are also encompassed within the invention, subject to any specifically excluded limit in the stated range. Where the stated range includes one or both of the limits, ranges excluding either or both of those included limits are also included in the invention.

[0089] Unless defined otherwise, all technical and scientific terms used herein have the same meaning as commonly understood by one of ordinary skill in the art to which this invention belongs. Although any methods and materials similar or equivalent to those described herein can also be used in the practice or testing of the present invention, the preferred methods and materials are now described. All publications mentioned herein are incorporated herein by reference to disclose and describe the methods and/or materials in connection with which the publications are cited.

[0090] It must be noted that as used herein and in the appended claims, the singular forms “a,” “an,” and “the” include plural referents unless the context clearly dictates otherwise. Thus, for example, reference to “a stem cell” includes a plurality of such stem cells and reference to “the genome editing endonuclease” includes reference to one or more genome editing endonucleases and equivalents thereof known to those skilled in the art, and so forth. It is further noted that the claims may be drafted to exclude any optional element. As such, this statement is intended to serve as antecedent basis for use of such exclusive terminology as “solely,” “only” and the like in connection with the recitation of claim elements, or use of a “negative” limitation.

[0091] It is appreciated that certain features of the invention, which are, for clarity, described in the context of separate embodiments, may also be provided in combination in a single embodiment. Conversely, various features of the invention, which are, for brevity, described in the context of a single embodiment, may also be provided separately or in any suitable sub-combination. All combinations of the embodiments pertaining to the invention are specifically embraced by the present invention and are disclosed herein just as if each and every combination was individually and explicitly disclosed. In addition, all sub-combinations of the various embodiments and elements thereof are also specifically embraced by the present invention and are disclosed herein just as if each and every such sub-combination was individually and explicitly disclosed herein.

[0092] The publications discussed herein are provided solely for their disclosure prior to the filing date of the present application. Nothing herein is to be construed as an admission that the present invention is not entitled to antedate such publication by virtue of prior invention. Further, the dates of publication provided may be different from the actual publication dates which may need to be independently confirmed.

### DETAILED DESCRIPTION

[0093] The present disclosure provides methods for gene editing in stem cells. The methods generally involve modifying the stem cells by increasing the level of an apoptosis regulator in the stem cells; and introducing into the modified stem cells a genome editing composition. Genome editing includes NHEJ and HDR. A genome-editing endonuclease generates a single- or double-strand break in a target genomic DNA, and the single- or double-strand break is repaired. Repair that occurs via NHEJ is sometimes referred to an “indel” (insertion or deletion); DNA repair via HDR is sometimes referred to as “gene correction” or “gene modification.” In some cases, editing a target genomic DNA involves generating a substitution of one or more nucleotides in the target genomic DNA, generating an edited target genomic DNA. In some cases, editing a target genomic DNA involves deletion of one or more nucleotides from the target genomic DNA, generating an edited target genomic DNA. In some cases, editing a target genomic DNA involves insertion of one or more nucleotides from the target genomic DNA, generating an edited target genomic DNA.

[0094] The present disclosure provides a method of editing a target genomic DNA in a mammalian stem cell, the method comprising: a) overexpressing an apoptosis regulator in the cell; and b) contacting the cell with a genome targeting composition comprising a genome editing endonuclease, or a nucleic acid encoding the genome editing endonuclease, wherein the genome editing endonuclease cleaves within a desired target sequence of the genomic DNA of the cell, wherein the genome-editing endonuclease enters the cell and edits the target genomic DNA.

[0095] The present disclosure provides a method of editing a target genomic DNA of a mammalian stem cell, the method comprising: a) overexpressing an apoptosis regulator in the cell; and b) contacting the cell with a ribonucleoprotein (RNP) complex comprising a class 2 CRISPR/Cas endonuclease complexed with a corresponding CRISPR/Cas guide RNA that hybridizes to a target sequence within the genomic DNA of the cell, wherein the class 2 CRISPR/Cas endonuclease cleaves the genomic DNA, resulting in editing of the target genomic DNA.

[0096] As noted above, a method of the present disclosure comprises overexpressing an apoptosis regulator in a mammalian stem cell. In some cases, the apoptosis regulator is transiently overexpressed. For example, in some cases, the apoptosis regulator is overexpressed for a period of time of from about 1 hour to about 48 hours. For example, in some cases, the apoptosis regulator is overexpressed for a period of time of from about 1 hour to about 4 hours, from about 4 hours to about 8 hours, from about 8 hours to about 12 hours, from about 12 hours to about 16 hours, from about 16 hours to about 20 hours, from about 20 hours to about 24 hours, from about 24 hours to about 30 hours, from about 30 hours to about 36 hours, from about 36 hours to about 42 hours, or from about 42 hours to about 48 hours. In some cases, the apoptosis regulator is overexpressed for a period of time of from about 1 hour to about 72 hours. In some cases, the apoptosis regulator is overexpressed for a period of time of from about 48 hours to about 72 hours, e.g., from about 48 hours to about 54 hours, from about 54 hours to about 60 hours, from about 60 hours to about 66 hours, or from about 66 hours to about 72 hours.

[0097] The apoptosis regulator is overexpressed such that the level of the apoptosis regulator in the modified stem cell is at least 25%, at least 50%, at least 75%, at least 2-fold, at least 2.5-fold, at least 5-fold, at least 10-fold, at least 25-fold, or more than 25-fold, higher than the background level of the apoptosis regulator in a control (unmodified) stem cell. For example, in some cases, the apoptosis regulator is overexpressed such that the level of the apoptosis regulator in the modified stem cell is from 25% to 50%, from 50% to 75%, from 75% to 2-fold, from 2-fold to 2.5-fold, from 2.5-fold to 5-fold, from 5-fold to 10-fold, from 10-fold to 25-fold, or from 25-fold to 50-fold, higher than the background level of the apoptosis regulator in a control (unmodified) stem cell.

[0098] Overexpressing an apoptosis regulator in a mammalian stem cell generates a modified mammalian stem cell. Thus, the step of contacting the mammalian stem cell with a genome targeting composition, or with an RNP, occurs during a period of time in which the apoptosis regulator is overexpressed.

[0099] Overexpression of an apoptosis regulator in a mammalian stem cell can be achieved by any known method. In some cases, an apoptosis regulator is introduced in a stem cell as a polypeptide. In such cases, the apoptosis regulator can be modified with a heterologous polypeptide that facilitates entry into the cell. For example, a fusion protein comprising an apoptosis regulator and a fusion partner that facilitates entry into a stem cell can be used. Suitable fusion partners include, e.g., a protein transduction domain (PTD; also referred to as a cell-penetrating peptide or CPP). Examples of PTDs include but are not limited to a minimal undecapeptide protein transduction domain (corresponding to residues 47-57 of HIV-1 TAT comprising YGRKKRRQRRR; SEQ ID NO:1076); a polyarginine sequence comprising a number of arginines sufficient to direct entry into a cell (e.g., 3, 4, 5, 6, 7, 8, 9, 10, or 10-50 arginines); a VP22 domain (Zender et al. (2002) Cancer Gene Ther. 9(6):489-96); an Drosophila Antennapedia protein transduction domain (Noguchi et al. (2003) Diabetes 52(7):1732-1737); a truncated human calcitonin peptide (Trehin et al. (2004) Pharm. Research 21:1248-1256); polylysine (Wender et al. (2000) Proc. Natl. Acad. Sci. USA 97:13003-13008); RRQRRTSKLMKR (SEQ ID NO:1077); Transportan GWTLNSAGYLLGKINLKALAALAKKIL (SEQ ID NO:1078); KALAWEAKLAKALAKALAKHLAKALAKALKCEA (SEQ ID NO: 1079); and RQIKIWFQNRRMKWKK (SEQ ID NO: 1080). Exemplary PTDs include but are not limited to, YGRKKRRQRRR (SEQ ID NO:1081), RKKRRQRRR (SEQ ID NO:1082); an arginine homopolymer of from 3 arginine residues to 50 arginine residues; Exemplary PTD domain amino acid sequences include, but are not limited to, any of the following: YGRKKRRQRRR (SEQ ID NO:1083); RKKRRQRR (SEQ ID NO:1084); YARAAARQARA (SEQ ID NO: 1085); THRLPRRRRRR (SEQ ID NO: 1086); and GGRRARRRRRR (SEQ ID NO: 1087). In some embodiments, the PTD is an activatable CPP (ACPP) (Aguilera et al. (2009) Integr Biol (Camb) June; 1(5-6): 371-381). ACPPs comprise a polycationic CPP (e.g., Arg9 or “R9”) connected via a cleavable linker to a matching polyanion (e.g., Glu9 or “E9”), which reduces the net charge to nearly zero and thereby inhibits adhesion and uptake into cells. Upon cleavage of the linker, the polyanion is released, locally unmasking the polyarginine and its inherent adhesiveness, thus “activating” the ACPP to traverse the membrane.

[0100] In some cases, an mRNA comprising a nucleotide sequence encoding the apoptosis regulator is introduced into a mammalian stem cell, where the mRNA enters the stem cell and the apoptosis regulator-encoding mRNA is translated.

[0101] As another example, in some cases, a recombinant expression vector comprising a nucleotide sequence encoding an apoptosis regulator is introduced into a mammalian stem cell, where the apoptosis regulator-encoding nucleotide sequence is expressed in the stem cell. Suitable expression vectors that can be used to generate a recombinant expression vector comprising a nucleotide sequence encoding an apoptosis regulator are known in the art; suitable examples include adeno-associated virus vectors, lentivirus vectors, retroviral vectors, herpes simplex virus vectors, and the like. A nucleotide sequence encoding an apoptosis regulator can be operably linked to a transcriptional control element(s), e.g., a promoter, where the promoter is active in a stem cell. In some cases, the promoter is a constitutive promoter. In some cases, the promoter is an inducible promoter.

[0102] Overexpression (e.g., transient overexpression) of an apoptosis regulator in a stem cell increases the survival of the stem cell when the stem cell is contacted with a genome targeting composition (e.g., a composition comprising a genome editing nuclease; a composition comprising a genome editing nuclease and a donor polynucleotide; a composition comprising an RNA-guided genome editing nuclease and a guide RNA; a composition comprising an RNA-guided genome editing nuclease, a guide RNA, and a donor polynucleotide; etc., as described below). For example, overexpression (e.g., transient overexpression) of an apoptosis regulator in a stem cell increases the survival of the stem cell when the stem cell is contacted with a genome targeting composition by at least 10%, at least 15%, at least 20%, at least 25%, at least 50%, at least 2-fold, at least 5-fold, at least 10-fold, at least 20-fold, at least 50-fold, or more than 50-fold, compared with the survival of a control stem cell that does not overexpress the apoptosis regulator, and is contacted with the genome targeting composition. In some cases, overexpression (e.g., transient overexpression) of an apoptosis regulator in a population of stem cells increases the percent of the stem cells that survive genome editing (e.g., that survive contact with a genome editing composition). For example, in some cases, overexpression (e.g., transient overexpression) of an apoptosis regulator in a population of stem cells increases the percent of the stem cells that survive genome editing (e.g., that survive contact with a genome editing composition) by at least 10%, at least 15%, at least 20%, at least 25%, at least 50%, at least 2-fold, at least 3-fold, at least 4-fold, or at least 5-fold, compared with the percent of control stem cells that survive genome editing (e.g., that survive contact with a genome editing composition), where the control stem cells do not overexpress the apoptosis regulator. As another example, in some cases, at least 40%, at least 50%, at least 60%, at least 70%, at least 75%, at least 80%, at least 85%, at least 90%, or at least 95%, of a stem cell population that overexpresses (e.g., transiently overexpresses) an apoptosis regulator survives genome editing (e.g., survives contact with a genome editing composition). Thus, the efficiency of genome editing of a stem cell is increased when the stem cell overexpresses an apoptosis regulator.

### Apoptosis Regulators

[0103] Suitable apoptosis regulators inhibit apoptosis in a stem cell. Suitable apoptosis regulators include, but are not limited to, Bcl-2, a caspase-9-DN mutant, baculovirus p35, caspase-9S, crmA, z-VAD-fmk, z-DEVD-fmk, B-D-fmk, z-YVAD-fmk, Bcl-xL, Mcl-1, XIAP, TIAP, KIAP, NAIP, cIAP1, cIAP2, API1, API2, API3, API4, HIAP1, HIAP2, MIHA, MIHB, MIHC, ILP, ILP-2, TLAP, survivin, livin, apollon, BRUCE, MLIAP, SODD and FLIP and variants thereof.

[0104] In some cases, the apoptosis regulator is a Bcl-2 polypeptide comprising an amino acid sequence having at least 85%, at least 90%, at least 95%, at least 98%, at least 99%, or 100%, amino acid sequence identity to the amino acid sequence depicted in FIG. 1A.

[0105] In some cases, the apoptosis regulator is a Bcl-2 polypeptide comprising an amino acid sequence having at least 85%, at least 90%, at least 95%, at least 98%, at least 99%, or 100%, amino acid sequence identity to the amino acid sequence depicted in FIG. 1B.

[0106] In some cases, the apoptosis regulator is an Mcl1 polypeptide comprising an amino acid sequence having at least 85%, at least 90%, at least 95%, at least 98%, at least 99%, or 100%, amino acid sequence identity to the amino acid sequence depicted in FIG. 2.

[0107] In some cases, the apoptosis regulator is a survivin polypeptide comprising an amino acid sequence having at least 85%, at least 90%, at least 95%, at least 98%, at least 99%, or 100%, amino acid sequence identity to the amino acid sequence depicted in FIG. 3.

[0108] In some cases, the apoptosis regulator is an XIAP polypeptide comprising an amino acid sequence having at least 85%, at least 90%, at least 95%, at least 98%, at least 99%, or 100%, amino acid sequence identity to the amino acid sequence depicted in FIG. 4.

[0109] In some cases, the apoptosis regulator is a cIAP1 polypeptide comprising an amino acid sequence having at least 85%, at least 90%, at least 95%, at least 98%, at least 99%, or 100%, amino acid sequence identity to the amino acid sequence depicted in FIG. 5.

[0110] In some cases, the apoptosis regulator is a Bcl-xL polypeptide comprising an amino acid sequence having at least 85%, at least 90%, at least 95%, at least 98%, at least 99%, or 100%, amino acid sequence identity to the amino acid sequence depicted in FIG. 6.

[0111] Stem Cells

[0112] The present disclosure provides methods of editing a target genomic DNA of a mammalian stem cell. Stem cells include, e.g., hematopoietic stem cells, embryonic stem cells, mesenchymal stem cells, neural stem cells, epidermal stem cells, endothelial stem cells, gastrointestinal stem cells, liver stem cells, cord blood stem cells, amniotic fluid stem cells, skeletal muscle stem cells, smooth muscle stem cells (e.g., cardiac smooth muscle stem cells), pancreatic stem cells, olfactory stem cells, hematopoietic stem cells, and induced pluripotent stem cells. Thus, the target genomic DNA can be present in a hematopoietic stem cell, an embryonic stem cell, a mesenchymal stem cell, a neural stem cell, an epidermal stem cell, an endothelial stem cell, a gastrointestinal stem cell, a liver stem cell, a cord blood stem cell, an amniotic fluid stem cell, a skeletal muscle stem cell, a smooth muscle stem cell (e.g., a cardiac smooth muscle stem cell), a pancreatic stem cell, an olfactory stem cell, a hematopoietic stem cell, or an induced pluripotent stem cell.

[0113] Suitable human embryonic stem (ES) cells include, but are not limited to, any of a variety of available human ES lines, e.g., BG01 (hESBGN-01), BG02 (hESBGN-02), BG03 (hESBGN-03) (BresaGen, Inc.; Athens, Ga.); SA01 (Sahlgrenska 1), SA02 (Sahlgrenska 2) (Cellartis AB; Goeteborg, Sweden); ES01 (HES-1), ES01 (HES-2), ES03 (HES-3), ES04 (HES-4), ES05 (HES-5), ES06 (HES-6) (ES Cell International; Singapore); UC01 (HSF-1), UC06 (HSF-6) (University of California, San Francisco; San Francisco, Calif.); WA01 (H1), WA07 (H7), WA09 (H9), WA09/Oct4D10 (H9-hOct4-pGZ), WA13 (H13), WA14 (H14) (Wisconsin Alumni Research Foundation; WARF; Madison, Wis.). Cell line designations are given as the National Institutes of Health (NIH) code, followed in parentheses by the provider code. See, e.g., U.S. Pat. No. 6,875,607.

[0114] Suitable human ES cell lines can be positive for one, two, three, four, five, six, or all seven of the following markers: stage-specific embryonic antigen-3 (SSEA-3); SSEA-4; TRA 1-60; TRA 1-81; Oct-4; GCTM-2; and alkaline phosphatase.

[0115] Hematopoietic stem cells (HSCs) are mesoderm-derived cells that can be isolated from bone marrow, blood, cord blood, fetal liver and yolk sac. HSCs are characterized as CD34⁺ and CD3⁻. HSCs can repopulate the erythroid, neutrophil-macrophage, megakaryocyte and lymphoid hematopoietic cell lineages in vivo. In vitro, HSCs can be induced to undergo at least some self-renewing cell divisions and can be induced to differentiate to the same lineages as is seen in vivo. As such, HSCs can be induced to differentiate into one or more of erythroid cells, megakaryocytes, neutrophils, macrophages, and lymphoid cells.

[0116] Neural stem cells (NSCs) are capable of differentiating into neurons, and glia (including oligodendrocytes, and astrocytes). A neural stem cell is a multipotent stem cell which is capable of multiple divisions, and under specific conditions can produce daughter cells which are neural stem cells, or neural progenitor cells that can be neuroblasts or glioblasts, e.g., cells committed to become one or more types of neurons and glial cells respectively. Methods of obtaining NSCs are known in the art.

[0117] Mesenchymal stem cells (MSC), originally derived from the embryonal mesoderm and isolated from adult bone marrow, can differentiate to form muscle, bone, cartilage, fat, marrow stroma, and tendon. Methods of isolating MSC are known in the art; and any known method can be used to obtain MSC. See, e.g., U.S. Pat. No. 5,736,396, which describes isolation of human MSC.

[0118] An induced pluripotent stem (iPS) cells is a pluripotent stem cell induced from a somatic cell, e.g., a differentiated somatic cell. iPS cells are capable of self-renewal and differentiation into cell fate-committed stem cells, including neural stem cells, as well as various types of mature cells.

[0119] iPS cells can be generated from somatic cells, including skin fibroblasts, using, e.g., known methods. iPS cells produce and express on their cell surface one or more of the following cell surface antigens: SSEA-3, SSEA-4, TRA-1-60, TRA-1-81, TRA-2-49/6E, and Nanog. In some cases, iPS cells produce and express on their cell surface SSEA-3, SSEA-4, TRA-1-60, TRA-1-81, TRA-2-49/6E, and Nanog. iPS cells express one or more of the following genes: Oct-3/4, Sox2, Nanog, GDF3, REX1, FGF4, ESG1, DPPA2, DPPA4, and hTERT. In some embodiments, an iPS cell expresses Oct-3/4, Sox2, Nanog, GDF3, REX1, FGF4, ESG1, DPPA2, DPPA4, and hTERT. Methods of generating iPS are known in the art, and any such method can be used to generate iPS. See, e.g., Takahashi and Yamanaka (2006) Cell 126:663-676; Yamanaka et. al. (2007) Nature 448:313-7; Wernig et. al. (2007) Nature 448:318-24; Maherali (2007) Cell Stem Cell 1:55-70; Nakagawa et al. (2008) Nat. Biotechnol. 26:101; Takahashi et al. (2007) Cell 131:861; Takahashi et al. (2007) Nat. Protoc. 2:3081; and Okita et al. (2007 Nature 448:313.

[0120] iPS cells can be generated from somatic cells (e.g., skin fibroblasts) by genetically modifying the somatic cells with one or more expression constructs encoding Oct-3/4 and Sox2. In some cases, somatic cells are genetically modified with one or more expression constructs comprising nucleotide sequences encoding Oct-3/4, Sox2, c-myc, and Klf4. In some embodiments, somatic cells are genetically modified with one or more expression constructs comprising nucleotide sequences encoding Oct-4, Sox2, Nanog, and LIN28.

[0121] In some cases, a target genomic DNA is the genomic DNA of a mammalian hematopoietic stem cell (HSC) (e.g., mobilized peripheral blood (mPB) CD34(+) cells, bone marrow (BM) CD34(+) cells, and the like). In some cases, the HSC is a long-term (LT)-HSC. The HSC can be from any mammal, e.g., a horse, dog, cat, goat, cow, pig, sheep, primate, non-human primate, or human. Suitable HSCs include, but are not limited to: mobilized peripheral blood (mPB) CD34(+) cells and bone marrow (BM) CD34(+) cells.

[0122] In some cases, the mammalian HSC (e.g., human HSC) is a mobilized peripheral blood (mPB) CD34(+) cell or a bone marrow (BM) CD34(+) cell. In some cases, the mammalian HSC (e.g., human HSC) is a long-term (LT)-HSC. In some cases, the mammalian HSC (e.g., human HSC) is from an individual with a sickle cell disease or with X-linked hyper IgM syndrome. In some cases, the mammalian HSC (e.g., human HSC) is from an individual with X-linked gammaglobulinemia.

[0123] In some cases, the HSC (e.g., a mobilized peripheral blood (mPB) CD34(+) cell, a bone marrow (BM) CD34(+) cell, etc.) into which the subject compositions are introduced is in vivo. In some cases, the HSC into which the subject compositions are introduced is in vitro or ex vivo. For example, in some cases, the HSC into which the subject compositions are introduced is isolated (e.g., in culture), and in some cases the HSC is a primary cell (e.g., a mobilized peripheral blood (mPB) CD34(+) cell, a bone marrow (BM) CD34(+) cell, etc.) that was isolated/harvested from an individual (e.g., an individual with a disease such as sickle cell disease or X-linked hyper IgM syndrome). In some cases, the individual from whom the HSC (e.g., a mobilized peripheral blood (mPB) CD34(+) cell, a bone marrow (BM) CD34(+) cell, etc.) is isolated has X-Linked Hyper-IgM Syndrome (e.g., caused by a mutation in the gene CD40 Ligand (CD40L)). In some cases, the individual from whom the HSC (e.g., a mobilized peripheral blood (mPB) CD34(+) cell, a bone marrow (BM) CD34(+) cell, etc.) is isolated has Sickle cell disease (e.g., caused by a mutation in the beta-globin gene (HBB)). In some cases, the individual from whom the HSC (e.g., a mobilized peripheral blood (mPB) CD34(+) cell, a bone marrow (BM) CD34(+) cell, etc.) is isolated has X-Linked agammaglobulinemia (XLA) (e.g., caused by a mutation in the Bruton tyrosine kinase (BTK) gene).

[0124] HSCs can be obtained from several different sources including bone marrow, mobilized peripheral blood, and umbilical cord blood. Methods of harvesting HSCs (e.g., mobilized peripheral blood (mPB) CD34(+) cells, bone marrow (BM) CD34(+) cells, and the like) from an individual will be known to one of ordinary skill in the art and any convenient method can be used. For example, G-CSF can be used to mobilize HSCs, which can be harvested as mobilized peripheral blood (mPB) CD34(+) cells. For example, harvesting HSCs from bone marrow (BM) can be a one-time, single-day procedure whereas harvesting HSCs from mobilized peripheral blood (mPB) can extend over the stem cell mobilization period (e.g., 4 to 5 days) and the harvesting period (e.g., 1 to 3 days).

[0125] In some cases, granulocyte colony-stimulating factor (G-CSF) is used as an HSC mobilizing agent (e.g., i.e., an agent to increase the level of circulating HSCs). For example, the administration of G-CSF daily for 4 to 6 days can results in a 10- to 30-fold increase in the number of circulating HSCs and G-CSF-mobilized HSCs collected by apheresis can be used for various purposes (e.g., transplantation, immune therapy, treatment of cardiac ischemia, cancer treatment, etc.). Any convenient HSC mobilizing agent can be used and several such agents will be known to one of ordinary skill in the art. Suitable HSC mobilization agents include, e.g., granulocyte colony stimulating factor (G-CSF), granulocyte-macrophage colony stimulating factor (GM-CSF), GRO-13 (CXCL2), an N-terminal 4-amino acid truncated form of GRO-β, pegfilgrastim, AMD-3100 (1,1′-[1,4-Phenylenebis(methylene)]bis [1,4,8,11-tetraazacyclotetradecane]), and the like.

[0126] Genome Targeting Composition

[0127] A genome targeting composition is a composition that includes a genome editing nuclease that is (or can be) targeted to a desired sequence within a target genome. A genome editing nuclease is an endonuclease capable of cleaving the phosphodiester bond within a polynucleotide chain at a designated specific site within a selected genomic target DNA (e.g., causing a double-stranded break (DSB)) without damaging the bases. In some embodiments, the genome editing nuclease binds a native or endogenous recognition sequence. In some embodiments, the genome editing nuclease is a modified endonuclease that binds a non-native or exogenous recognition sequence and does not bind a native or endogenous recognition sequence.

[0128] Examples of suitable genome editing nucleases include but are not limited to zinc finger nucleases, TAL-effector DNA binding domain-nuclease fusion proteins (transcription activator-like effector nucleases (TALENs)), and CRISPR/Cas endonucleases (e.g., class 2 CRISPR/Cas endonucleases such as a type II, type V, or type VI CRISPR/Cas endonucleases). Thus, in some embodiments, a genome targeting composition can include one or more genome editing nucleases selected from: a zinc finger nuclease, a TAL-effector DNA binding domain-nuclease fusion protein (TALEN), and a CRISPR/Cas endonuclease (e.g., a class 2 CRISPR/Cas endonuclease such as a type II, type V, or type VI CRISPR/Cas endonuclease). In some cases, a genome targeting composition includes a zinc finger nuclease or a TALEN. In some cases, a genome targeting composition includes a class 2 CRISPR/Cas endonuclease. In some cases, a genome targeting composition includes a class 2 type II CRISPR/Cas endonuclease (e.g., a Cas9 protein). In some cases, a genome targeting composition includes a class 2 type V CRISPR/Cas endonuclease (e.g., a Cpf1 protein, a C2c1 protein, or a C2c3 protein). In some cases, a genome targeting composition includes a class 2 type VI CRISPR/Cas endonuclease (e.g., a C2c2 protein).

[0129] As described in more detail below, a CRISPR/Cas endonuclease interacts with (binds to) a corresponding guide RNA to form a ribonucleoprotein (RNP) complex that is targeted to a particular site in a target genome via base pairing between the guide RNA and a target sequence within the target genome. A guide RNA includes a nucleotide sequence (a guide sequence) that is complementary to a sequence (the target site) of a target nucleic acid. Thus, when a subject genome targeting composition includes a CRISPR/Cas endonuclease (e.g., a class 2 CRISPR/Cas endonuclease), it must also include a corresponding guide RNA when being used in a method to cleave a target DNA. However, because the guide RNA can be readily modified in order to target any desired sequence within a target genome, in some cases, a composition includes only the CRISPR/Cas endonuclease (or a nucleic acid encoding the CRISPR/Cas endonuclease) until a user adds the desired corresponding guide RNA (or a nucleic acid encoding the corresponding guide RNA).

[0130] The components of a subject genome targeting composition can be delivered (introduced into a stem cell) as DNA, RNA, or protein. For example, when the composition includes a class 2 CRISPR/Cas endonuclease (e.g., Cas9, Cpf1, etc.) and a corresponding guide RNA (e.g., a Cas9 guide RNA, a Cpf1 guide RNA, etc.), the endonuclease and guide RNA can be delivered (introduced into the cell) as an RNP complex (i.e., a pre-assembled complex of the CRISPR/Cas endonuclease and the corresponding CRISPR/Cas guide RNA). Thus, a class 2 CRISPR/Cas endonuclease can be introduced into a cell as a protein. Alternatively, a class 2 CRISPR/Cas endonuclease can be introduced into a cell as a nucleic acid (DNA and/or RNA) encoding the endonuclease. A CRISPR/Cas guide RNA can be introduced into a cell as RNA, or as DNA encoding the guide RNA. Likewise, a zinc finger nuclease and/or a TALEN can be introduced into a cell as a protein or alternatively as a nucleic acid (DNA and/or RNA) encoding the protein.

[0131] In some cases, a genome editing nuclease is a fusion protein that is fused to a heterologous polypeptide (also referred to as a “fusion partner”). In some cases, a genome editing nuclease is fused to an amino acid sequence (a fusion partner) that provides for subcellular localization, i.e., the fusion partner is a subcellular localization sequence (e.g., one or more nuclear localization signals (NLSs) for targeting to the nucleus, two or more NLSs, three or more NLSs, etc.). In some embodiments, a genome editing nuclease is fused to an amino acid sequence (a fusion partner) that provides a tag (i.e., the fusion partner is a detectable label) for ease of tracking and/or purification (e.g., a fluorescent protein, e.g., green fluorescent protein (GFP), YFP, RFP, CFP, mCherry, tdTomato, and the like; a histidine tag, e.g., a 6×His tag; a hemagglutinin (HA) tag; a FLAG tag; a Myc tag; and the like). In some embodiments, the fusion partner can provide for increased or decreased stability (i.e., the fusion partner can be a stability control peptide, e.g., a degron, which in some cases is controllable (e.g., a temperature sensitive or drug controllable degron sequence).

[0132] In some cases, a genome editing nuclease is conjugated (e.g., fused) to a polypeptide permeant domain to promote uptake by the cell (i.e., the fusion partner promotes uptake by a cell). A number of permeant domains are known in the art and may be used, including peptides, peptidomimetics, and non-peptide carriers. For example, a permeant peptide may be derived from the third alpha helix of Drosophila melanogaster transcription factor Antennapaedia, referred to as penetratin, which comprises the amino acid sequence RQIKIWFQNRRMKWKK (SEQ ID NO:1080). As another example, the permeant peptide can comprise the HIV-1 tat basic region amino acid sequence, which may include, for example, amino acids 49-57 of naturally-occurring tat protein. Other permeant domains include poly-arginine motifs, for example, the region of amino acids 34-56 of HIV-1 rev protein, nona-arginine, octa-arginine, and the like. (See, for example, Futaki et al. (2003) Curr Protein Pept Sci. 2003 April; 4(2): 87-9 and 446; and Wender et al. (2000) Proc. Natl. Acad. Sci. U.S.A 2000 Nov. 21; 97(24):13003-8; published U.S. Patent applications 20030220334; 20030083256; 20030032593; and 20030022831, herein specifically incorporated by reference for the teachings of translocation peptides and peptoids). The nona-arginine (R9) sequence is one of the more efficient PTDs that have been characterized (Wender et al. 2000; Uemura et al. 2002). The site at which the fusion is made may be selected in order to optimize the biological activity, secretion or binding characteristics of the polypeptide. The optimal site can be determined by routine experimentation.

[0133] In some cases, a genome editing nuclease includes a “Protein Transduction Domain” or PTD (also known as a CPP—cell penetrating peptide), which refers to a polypeptide, polynucleotide, carbohydrate, or organic or inorganic compound that facilitates traversing a lipid bilayer, micelle, cell membrane, organelle membrane, or vesicle membrane. A PTD attached to another molecule, which can range from a small polar molecule to a large macromolecule and/or a nanoparticle, facilitates the molecule traversing a membrane, for example going from extracellular space to intracellular space, or cytosol to within an organelle. In some embodiments, a PTD is covalently linked to the amino terminus a polypeptide (e.g., a genome editing nuclease, e.g., a Cas9 protein). In some embodiments, a PTD is covalently linked to the carboxyl terminus of a polypeptide (e.g., a genome editing nuclease, e.g., a Cas9 protein). In some cases, the PTD is inserted internally in the genome editing nuclease (e.g., Cas9 protein) (i.e., is not at the N- or C-terminus of the genome editing nuclease). In some cases, a subject genome editing nuclease (e.g., Cas9 protein) includes (is conjugated to, is fused to) one or more PTDs (e.g., two or more, three or more, four or more PTDs). In some cases a PTD includes a nuclear localization signal (NLS) (e.g., in some cases 2 or more, 3 or more, 4 or more, or 5 or more NLSs).

[0134] In some cases, a genome editing nuclease (e.g., Cas9 protein) includes one or more NLSs (e.g., 2 or more, 3 or more, 4 or more, or 5 or more NLSs). In some embodiments, a PTD is covalently linked to a nucleic acid (e.g., a CRISPR/Cas guide RNA, a polynucleotide encoding a CRISPR/Cas guide RNA, a polynucleotide encoding a class 2 CRISPR/Cas endonuclease such as a Cas9 protein or a type V or type VI CRISPR/Cas protein, etc.). Examples of PTDs include but are not limited to a minimal undecapeptide protein transduction domain (corresponding to residues 47-57 of HIV-1 TAT comprising YGRKKRRQRRR; SEQ ID NO: 1076); a polyarginine sequence comprising a number of arginines sufficient to direct entry into a cell (e.g., 3, 4, 5, 6, 7, 8, 9, 10, or 10-50 arginines); a VP22 domain (Zender et a. (2002) Cancer Gene Ther. 9(6):489-96); an Drosophila Antennapedia protein transduction domain (Noguchi et a. (2003) Diabetes 52(7):1732-1737); a truncated human calcitonin peptide (Trehin et al. (2004) Pharm. Research 21:1248-1256); polylysine (Wender et al. (2000) Proc. Natl. Acad. Sci. USA 97:13003-13008); RRQRRTSKLMKR (SEQ ID NO:1077); Transportan GWTLNSAGYLLGKINLKALAALAKKIL (SEQ ID NO:1078); KALAWEAKLAKALAKALAKHLAKALAKALKCEA (SEQ ID NO: 1079); and RQIKIWFQNRRMKWKK (SEQ ID NO: 1080). Exemplary PTDs include but are not limited to, YGRKKRRQRRR (SEQ ID NO:1081), RKKRRQRRR (SEQ ID NO:1082); an arginine homopolymer of from 3 arginine residues to 50 arginine residues; Exemplary PTD domain amino acid sequences include, but are not limited to, any of the following: YGRKKRRQRRR (SEQ ID NO:1083); RKKRRQRR (SEQ ID NO:1084); YARAAARQARA (SEQ ID NO: 1085); THRLPRRRRRR (SEQ ID NO: 1086); and GGRRARRRRRR (SEQ ID NO: 1087). In some embodiments, the PTD is an activatable CPP (ACPP) (Aguilera et al. (2009) Integr Biol (Camb) June; 1(5-6): 371-381). ACPPs comprise a polycationic CPP (e.g., Arg9 or “R9”) connected via a cleavable linker to a matching polyanion (e.g., Glu9 or “E9”), which reduces the net charge to nearly zero and thereby inhibits adhesion and uptake into cells. Upon cleavage of the linker, the polyanion is released, locally unmasking the polyarginine and its inherent adhesiveness, thus “activating” the ACPP to traverse the membrane.

[0135] A genome editing nuclease (e.g., Cas9 protein) can have multiple (1 or more, 2 or more, 3 or more, etc.) fusion partners in any combination of the above. As an illustrative example, a genome editing nuclease (e.g., Cas9 protein) can have a fusion partner that provides for tagging (e.g., GFP), and can also have a subcellular localization sequence (e.g., one or more NLSs). In some cases, such a fusion protein might also have a tag for ease of tracking and/or purification (e.g., a histidine tag, e.g., a 6×His (His-His-His-His-His-His, SEQ ID NO: 1149) tag; a hemagglutinin (HA) tag; a FLAG tag; a Myc tag; and the like). As another illustrative example, genome editing nuclease (e.g., Cas9 protein) can have one or more NLSs (e.g., two or more, three or more, four or more, five or more, 1, 2, 3, 4, or 5 NLSs). In some cases a fusion partner (or multiple fusion partners, e.g., 1, 2, 3, 4, or 5 NLSs) (e.g., an NLS, a tag, a fusion partner providing an activity, etc.) is located at or near the C-terminus of the genome editing nuclease (e.g., Cas9 protein). In some cases a fusion partner (or multiple fusion partners, e.g., 1, 2, 3, 4, or 5 NLSs) (e.g., an NLS, a tag, a fusion partner providing an activity, etc.) is located at the N-terminus of the genome editing nuclease (e.g., Cas9 protein). In some cases the genome editing nuclease (e.g., Cas9 protein) has a fusion partner (or multiple fusion partners, e.g., 1, 2, 3, 4, or 5 NLSs)(e.g., an NLS, a tag, a fusion partner providing an activity, etc.) at both the N-terminus and C-terminus.

### Zinc Finger Nucleases (ZFNs)

[0136] In some cases, a genome editing nuclease used in a method of the present disclosure, or included in a genome targeting composition, is a zinc-finger nuclease (ZFN). ZFNs are engineered double-strand break inducing proteins comprised of a zinc finger DNA binding domain and a double strand break inducing agent domain. Engineered ZFNs consist of two zinc finger arrays (ZFAs), each of which is fused to a single subunit of a non-specific endonuclease, such as the nuclease domain from the FokI enzyme, which becomes active upon dimerization. Typically, a single ZFA consists of 3 or 4 zinc finger domains, each of which is designed to recognize a specific nucleotide triplet (GGC, GAT, etc.). Thus, ZFNs composed of two “3-finger” ZFAs are capable of recognizing an 18 base pair target site; an 18 base pair recognition sequence is generally unique, even within large genomes such as those of humans and plants. By directing the co-localization and dimerization of two FokI nuclease monomers, ZFNs generate a functional site-specific endonuclease that creates a double-stranded break (DSB) in DNA at the targeted locus. Zinc-finger endonucleases suitable for genome editing are known in the art. See, e.g., Hoban et al. (2015) Blood 125:2597.

[0137] Useful zinc-finger nucleases include those that are known and those that are engineered to have specificity for one or more desired target sites (TS). Zinc finger domains are amenable for designing polypeptides which specifically bind a selected polynucleotide recognition sequence, for example, within the target site of the host cell genome. ZFNs consist of an engineered DNA-binding zinc finger domain linked to a non-specific endonuclease domain, for example nuclease domain from a Type IIs endonuclease such as HO or FokI. Alternatively, engineered zinc finger DNA binding domains can be fused to other double-strand break inducing agents or derivatives thereof that retain DNA nicking/cleaving activity. For example, this type of fusion can be used to direct the double-strand break inducing agent to a different target site, to alter the location of the nick or cleavage site, to direct the inducing agent to a shorter target site, or to direct the inducing agent to a longer target site. In some examples a zinc finger DNA binding domain is fused to a site-specific recombinase, transposase, or a derivative thereof that retains DNA nicking and/or cleaving activity. Additional functionalities can be fused to the zinc-finger binding domain, including transcriptional activator domains, transcription repressor domains, and methylases. In some embodiments, dimerization of nuclease domain is required for cleavage activity.

[0138] Each zinc finger recognizes three consecutive base pairs in the target DNA. For example, a 3 finger domain recognized a sequence of 9 contiguous nucleotides, with a dimerization requirement of the nuclease, two sets of zinc finger triplets are used to bind a 18 nucleotide recognition sequence. Useful designer zinc finger modules include those that recognize various GNN and ANN triplets (Dreier, et al., (2001) J Biol Chem 276:29466-78; Dreier, et al., (2000) J Mol Biol 303:489-502; Liu, et al., (2002) J Biol Chem 277:3850-6), as well as those that recognize various CNN or TNN triplets (Dreier, et al., (2005) J Biol Chem 280:35588-97; Jamieson, et al., (2003) Nature Rev Drug Discov 2:361-8). See also, Durai, et al., (2005) Nucleic Acids Res 33:5978-90; Segal, (2002) Methods 26:76-83; Porteus and Carroll, (2005) Nat Biotechnol 23:967-73; Pabo, et al., (2001) Ann Rev Biochem 70:313-40; Wolfe, et al., (2000) Ann Rev Biophys Biomol Struct 29:183-212; Segal and Barbas, (2001) Curr Opin Biotechnol 12:632-7; Segal, et al., (2003) Biochemistry 42:2137-48; Beerli and Barbas, (2002) Nat Biotechnol 20:135-41; Carroll, et al., (2006) Nature Protocols 1:1329; Ordiz, et al., (2002) Proc Natl Acad Sci USA 99:13290-5; Guan, et al., (2002) Proc Natl Acad Sci USA 99:13296-301; WO2002099084; WO00/42219; WO02/42459; WO2003062455; US20030059767; US Patent Publication Number 2003/0108880; US Patent Publication Number 2014/0093913; U.S. Pat. Nos. 6,140,466, 6,511,808 and 6,453,242. Useful zinc-finger nucleases also include those described in WO03/080809; WO05/014791; WO05/084190; WO08/021207; WO09/042186; WO09/054985; and WO10/065123.

[0139] If the genome editing endonuclease to be utilized is a zinc finger nuclease, optimal target sites may be selected using a number of publicly available online resources. See, e.g., Reyon et al., BMC Genomics 12:83 (2011), which is hereby incorporated by reference in its entirety. For example, Oligomerized Pool Engineering (OPEN) is a highly robust and publicly available protocol for engineering zinc finger arrays with high specificity and in vivo functionality, and has been successfully used to generate ZFNs that function efficiently in plants, zebrafish, and human somatic and pluripotent stem cells. OPEN is a selection-based method in which a pre-constructed randomized pool of candidate ZFAs is screened to identify those with high affinity and specificity for a desired target sequence. ZFNGenome is a GBrowse-based tool for identifying and visualizing potential target sites for OPEN-generated ZFNs. ZFNGenome provides a compendium of potential ZFN target sites in sequenced and annotated genomes of model organisms. ZFNGenome currently includes a total of more than 11.6 million potential ZFN target sites, mapped within the fully sequenced genomes of seven model organisms; Saccharomyces cerevisiae, Chlamydomonas reinhardtii, Arabidopsis thaliana, Drosophila melanogaster, Danio rerio, Caenorhabditis elegans, and Homo sapiens. Additional model organisms, including three plant species; Glycine max (soybean), Oryza sativa (rice), Zea mays (maize), and three animal species Tribolium castaneum (red flour beetle), Mus musculus (mouse), Rattus norvegicus (brown rat) can also be used. ZFNGenome provides information about each potential ZFN target site, including its chromosomal location and position relative to transcription initiation site(s). Users can query ZFNGenome using several different criteria (e.g., gene ID, transcript ID, target site sequence).

[0140] For more information on ZFNs, refer to U.S. Pat. No. 8,685,737, which is hereby incorporated by reference in its entirety.

### TALENs

[0141] In some embodiments, a subject genome editing nuclease is a TAL-effector DNA binding domain-nuclease fusion protein (TALEN). A TAL effector comprises a DNA binding domain that interacts with DNA in a sequence-specific manner through one or more tandem repeat domains. The repeated sequence typically comprises 34 amino acids, and the repeats are typically 91-100% homologous with each other. Polymorphism of the repeats is usually located at positions 12 and 13, and there appears to be a one-to-one correspondence between the identity of repeat variable-diresidues at positions 12 and 13 with the identity of the contiguous nucleotides in the TAL-effector's target sequence.

[0142] The TAL-effector DNA binding domain can be engineered to bind to a desired target sequence, and fused to a nuclease domain, e.g., from a type II restriction endonuclease, typically a nonspecific cleavage domain from a type II restriction endonuclease such as FokI (see e.g., Kim et al. (1996) Proc. Natl. Acad. Sci. USA 93:1156-1160). Other useful endonucleases may include, for example, HhaI, HindIII, Nod, BbvCI, EcoRI, BglI, and AlwI. Thus, in some embodiments, a TALEN comprises a TAL effector domain comprising a plurality of TAL effector repeat sequences that, in combination, bind to a specific nucleotide sequence in the target DNA sequence, such that the TALEN cleaves the target DNA within or adjacent to the specific nucleotide sequence. Suitable TALENs include those described in WO10/079430 and U.S. Patent Application Publication No. 2011/0145940.

[0143] In some embodiments, the TAL effector domain that binds to a specific nucleotide sequence within the target DNA can comprise 10 or more DNA binding repeats, and in some cases 15 or more DNA binding repeats. In some embodiments, each DNA binding repeat comprises a repeat variable-diresidue (RVD) that determines recognition of a base pair in the target DNA sequence, wherein each DNA binding repeat is responsible for recognizing one base pair in the target DNA sequence, and wherein the RVD comprises one or more of: HD for recognizing C; NG for recognizing T; NI for recognizing A; NN for recognizing G or A; NS for recognizing A or C or G or T; N* for recognizing C or T, where * represents a gap in the second position of the RVD; HG for recognizing T; H* for recognizing T, where * represents a gap in the second position of the RVD; IG for recognizing T; NK for recognizing G; HA for recognizing C; ND for recognizing C; HI for recognizing C; HN for recognizing G; NA for recognizing G; SN for recognizing G or A; and YG for recognizing T.

[0144] If the genome editing endonuclease to be utilized is a TALEN, in some embodiments, optimal target sites may be selected in accordance with the methods described by Sanjana et al., Nature Protocols, 7:171-192 (2012), which is hereby incorporated by reference in its entirety. In brief, TALENs function as dimers, and a pair of TALENs, referred to as the left and right TALENs, target sequences on opposite strands of DNA. TALENs can be engineered as a fusion of the TALE DNA-binding domain and a monomeric FokI catalytic domain. To facilitate FokI dimerization, the left and right TALEN target sites can be chosen with a spacing of approximately 14-20 bases. Therefore, for a pair of TALENs, each targeting 20-bp sequences, an optimal target site can have the form 5′-TN¹⁹N¹⁴⁻²⁰N¹⁹A-3′, where the left TALEN targets 5′-TN¹⁹-3′ and the right TALEN targets the antisense strand of 5′-N¹⁹A-3′ (N=A, G, T or C).

[0145] For more information on TALENs, refer to U.S. Pat. No. 8,685,737, which is hereby incorporated by reference in its entirety.

### Class 2 CRISPR/Cas Endonucleases

[0146] RNA-mediated adaptive immune systems in bacteria and archaea rely on Clustered Regularly Interspaced Short Palindromic Repeat (CRISPR) genomic loci and CRISPR-associated (Cas) proteins that function together to provide protection from invading viruses and plasmids. In some embodiments, a genome editing nuclease of a genome targeting composition of the present disclosure is a class 2 CRISPR/Cas endonuclease. Thus in some cases, a subject genome targeting composition includes a class 2 CRISPR/Cas endonuclease (or a nucleic encoding the endonuclease). In class 2 CRISPR systems, the functions of the effector complex (e.g., the cleavage of target DNA) are carried out by a single endonuclease (e.g., see Zetsche et al, Cell. 2015 Oct. 22; 163(3):759-71; Makarova et al, Nat Rev Microbiol. 2015 November; 13(11):722-36; and Shmakov et al., Mol Cell. 2015 Nov. 5; 60(3):385-97). As such, the term “class 2 CRISPR/Cas protein” is used herein to encompass the endonuclease (the target nucleic acid cleaving protein) from class 2 CRISPR systems. Thus, the term “class 2 CRISPR/Cas endonuclease” as used herein encompasses type II CRISPR/Cas proteins (e.g., Cas9), type V CRISPR/Cas proteins (e.g., Cpf1, C2c1, C2C3), and type VI CRISPR/Cas proteins (e.g., C2c2). To date, class 2 CRISPR/Cas proteins encompass type II, type V, and type VI CRISPR/Cas proteins, but the term is also meant to encompass any class 2 CRISPR/Cas protein suitable for binding to a corresponding guide RNA and forming an RNP complex.

[0147] Type II CRISPR/Cas Endonucleases (e.g., Cas 9)

[0148] In natural Type II CRISPR/Cas systems, Cas9 functions as an RNA-guided endonuclease that uses a dual-guide RNA having a crRNA and trans-activating crRNA (tracrRNA) for target recognition and cleavage by a mechanism involving two nuclease active sites in Cas9 that together generate double-stranded DNA breaks (DSBs), or can individually generate single-stranded DNA breaks (SSBs). The Type II CRISPR endonuclease Cas9 and engineered dual-(dgRNA) or single guide RNA (sgRNA) form a ribonucleoprotein (RNP) complex that can be targeted to a desired DNA sequence. Guided by a dual-RNA complex or a chimeric single-guide RNA, Cas9 generates site-specific DSBs or SSBs within double-stranded DNA (dsDNA) target nucleic acids, which are repaired either by non-homologous end joining (NHEJ) or homology-directed recombination (HDR).

[0149] As noted above, in some cases, a genome targeting composition of the present disclosure includes a type II CRISPR/Cas endonuclease. A type II CRISPR/Cas endonuclease is a type of class 2 CRISPR/Cas endonuclease. In some cases, the type II CRISPR/Cas endonuclease is a Cas9 protein. A Cas9 protein forms a complex with a Cas9 guide RNA. The guide RNA provides target specificity to a Cas9-guide RNA complex by having a nucleotide sequence (a guide sequence) that is complementary to a sequence (the target site) of a target nucleic acid (as described elsewhere herein). The Cas9 protein of the complex provides the site-specific activity. In other words, the Cas9 protein is guided to a target site (e.g., stabilized at a target site) within a target nucleic acid sequence (e.g., a chromosomal sequence or an extrachromosomal sequence, e.g., an episomal sequence, a minicircle sequence, a mitochondrial sequence, a chloroplast sequence, etc.) by virtue of its association with the protein-binding segment of the Cas9 guide RNA

[0150] A Cas9 protein can bind and/or modify (e.g., cleave, nick, methylate, demethylate, etc.) a target nucleic acid and/or a polypeptide associated with target nucleic acid (e.g., methylation or acetylation of a histone tail)(e.g., when the Cas9 protein includes a fusion partner with an activity). In some cases, the Cas9 protein is a naturally-occurring protein (e.g., naturally occurs in bacterial and/or archaeal cells). In other cases, the Cas9 protein is not a naturally-occurring polypeptide (e.g., the Cas9 protein is a variant Cas9 protein, a chimeric protein, and the like)

[0151] Examples of suitable Cas9 proteins include, but are not limited to, those set forth in SEQ ID NOs: 5-816. Naturally occurring Cas9 proteins bind a Cas9 guide RNA, are thereby directed to a specific sequence within a target nucleic acid (a target site), and cleave the target nucleic acid (e.g., cleave dsDNA to generate a double strand break, cleave ssDNA, cleave ssRNA, etc.). A chimeric Cas9 protein is a fusion protein comprising a Cas9 polypeptide that is fused to a heterologous protein (referred to as a fusion partner), where the heterologous protein provides an activity (e.g., one that is not provided by the Cas9 protein). The fusion partner can provide an activity, e.g., enzymatic activity (e.g., nuclease activity, activity for DNA and/or RNA methylation, activity for DNA and/or RNA cleavage, activity for histone acetylation, activity for histone methylation, activity for RNA modification, activity for RNA-binding, activity for RNA splicing etc.). In some cases a portion of the Cas9 protein (e.g., the RuvC domain and/or the HNH domain) exhibits reduced nuclease activity relative to the corresponding portion of a wild type Cas9 protein (e.g., in some cases the Cas9 protein is a nickase). In some cases, the Cas9 protein is enzymatically inactive, or has reduced enzymatic activity relative to a wild-type Cas9 protein (e.g., relative to Streptococcus pyogenes Cas9).

[0152] Assays to determine whether given protein interacts with a Cas9 guide RNA can be any convenient binding assay that tests for binding between a protein and a nucleic acid. Suitable binding assays (e.g., gel shift assays) will be known to one of ordinary skill in the art (e.g., assays that include adding a Cas9 guide RNA and a protein to a target nucleic acid).

[0153] Assays to determine whether a protein has an activity (e.g., to determine if the protein has nuclease activity that cleaves a target nucleic acid and/or some heterologous activity) can be any convenient assay (e.g., any convenient nucleic acid cleavage assay that tests for nucleic acid cleavage). Suitable assays (e.g., cleavage assays) will be known to one of ordinary skill in the art and can include adding a Cas9 guide RNA and a protein to a target nucleic acid.

[0154] In some cases, a chimeric Cas9 protein includes a heterologous polypeptide that has enzymatic activity that modifies target nucleic acid (e.g., nuclease activity, methyltransferase activity, demethylase activity, DNA repair activity, DNA damage activity, deamination activity, dismutase activity, alkylation activity, depurination activity, oxidation activity, pyrimidine dimer forming activity, integrase activity, transposase activity, recombinase activity, polymerase activity, ligase activity, helicase activity, photolyase activity or glycosylase activity).

[0155] In other cases, a chimeric Cas9 protein includes a heterologous polypeptide that has enzymatic activity that modifies a polypeptide (e.g., a histone) associated with target nucleic acid (e.g., methyltransferase activity, demethylase activity, acetyltransferase activity, deacetylase activity, kinase activity, phosphatase activity, ubiquitin ligase activity, deubiquitinating activity, adenylation activity, deadenylation activity, SUMOylating activity, deSUMOylating activity, ribosylation activity, deribosylation activity, myristoylation activity or demyristoylation activity).

[0156] Many Cas9 orthologs from a wide variety of species have been identified and in some cases the proteins share only a few identical amino acids. Identified Cas9 orthologs have similar domain architecture with a central HNH endonuclease domain and a split RuvC/RNaseH domain (e.g., RuvCI, RuvCII, and RuvCIII) (e.g., see Table 1). For example, a Cas9 protein can have 3 different regions (sometimes referred to as RuvC-I, RuvC-II, and RucC-III), that are not contiguous with respect to the primary amino acid sequence of the Cas9 protein, but fold together to form a RuvC domain once the protein is produced and folds. Thus, Cas9 proteins can be said to share at least 4 key motifs with a conserved architecture. Motifs 1, 2, and 4 are RuvC like motifs while motif 3 is an HNH-motif. The motifs set forth in Table 1 may not represent the entire RuvC-like and/or HNH domains as accepted in the art, but Table 1 does present motifs that can be used to help determine whether a given protein is a Cas9 protein.

TABLE 1
Four motifs that are present in Cas9 sequences from various species.
The amino acids listed in this table are from the Cas9 from S. pyogenes
(SEQ ID NO: 5).

| Motif # | Motif | Amino acids (residue #s) | Highly conserved |
|---|---|---|---|
| 1 | RuvC-like I | IGLDIGTNSVGWAVI (7-21) | D10, G12, G17 |
| | | (SEQ ID NO: 1) | |
| 2 | RuvC-like II | IVIEMARE (759-766) | E762 |
| | | (SEQ ID NO: 2) | |
| 3 | HNH-motif | DVDHIVPQSFLKDDSIDNKVLTRSDKN | H840, N854, N863 |
| | | (837-863) (SEQ ID NO: 3) | |
| 4 | RuvC-like III | HHAHDAYL (982-989) | H982, H983, A984, |
| | | (SEQ ID NO: 4) | D986, A987 |

[0157] In some cases, a suitable Cas9 protein comprises an amino acid sequence having 4 motifs, each of motifs 1-4 having 60% or more, 70% or more, 75% or more, 80% or more, 85% or more, 90% or more, 95% or more, 99% or more or 100% amino acid sequence identity to motifs 1-4 as set forth in SEQ ID NOs: 1-4, respectively (e.g., see Table 1), or to the corresponding portions in any of the amino acid sequences set forth in SEQ ID NOs: 5-816.

[0158] In other words, in some cases, a suitable Cas9 polypeptide comprises an amino acid sequence having 4 motifs, each of motifs 1-4 having 60% or more, 70% or more, 75% or more, 80% or more, 85% or more, 90% or more, 95% or more, 99% or more or 100% amino acid sequence identity to motifs 1-4 of the Cas9 amino acid sequence set forth in SEQ ID NO:5 (e.g., the sequences set forth in SEQ ID NOs: 1-4, e.g., see Table 1), or to the corresponding portions in any of the amino acid sequences set forth in SEQ ID NOs: 6-816.

[0159] In some cases, a suitable Cas9 protein comprises an amino acid sequence having 4 motifs, each of motifs 1-4 having 60% or more amino acid sequence identity to motifs 1-4 of the Cas9 amino acid sequence set forth as SEQ ID NO:5 (the motifs are in Table 1, and are set forth as SEQ ID NOs: 1-4, respectively), or to the corresponding portions in any of the amino acid sequences set forth in SEQ ID NOs: 6-816. In some cases, a suitable Cas9 protein comprises an amino acid sequence having 4 motifs, each of motifs 1-4 having 70% or more amino acid sequence identity to motifs 1-4 of the Cas9 amino acid sequence set forth as SEQ ID NO:5 (the motifs are in Table 1, and are set forth as SEQ ID NOs: 1-4, respectively), or to the corresponding portions in any of the amino acid sequences set forth in SEQ ID NOs: 6-816. In some cases, a suitable Cas9 protein comprises an amino acid sequence having 4 motifs, each of motifs 1-4 having 75% or more amino acid sequence identity to motifs 1-4 of the Cas9 amino acid sequence set forth as SEQ ID NO:5 (the motifs are in Table 1, and are set forth as SEQ ID NOs: 1-4, respectively), or to the corresponding portions in any of the amino acid sequences set forth in SEQ ID NOs: 6-816. In some cases, a suitable Cas9 protein comprises an amino acid sequence having 4 motifs, each of motifs 1-4 having 80% or more amino acid sequence identity to motifs 1-4 of the Cas9 amino acid sequence set forth as SEQ ID NO:5 (the motifs are in Table 1, and are set forth as SEQ ID NOs: 1-4, respectively), or to the corresponding portions in any of the amino acid sequences set forth in SEQ ID NOs: 6-816. In some cases, a suitable Cas9 protein comprises an amino acid sequence having 4 motifs, each of motifs 1-4 having 85% or more amino acid sequence identity to motifs 1-4 of the Cas9 amino acid sequence set forth as SEQ ID NO:5 (the motifs are in Table 1, and are set forth as SEQ ID NOs: 1-4, respectively), or to the corresponding portions in any of the amino acid sequences set forth in SEQ ID NOs: 6-816. In some cases, a suitable Cas9 protein comprises an amino acid sequence having 4 motifs, each of motifs 1-4 having 90% or more amino acid sequence identity to motifs 1-4 of the Cas9 amino acid sequence set forth as SEQ ID NO:5 (the motifs are in Table 1, and are set forth as SEQ ID NOs: 1-4, respectively), or to the corresponding portions in any of the amino acid sequences set forth in SEQ ID NOs: 6-816. In some cases, a suitable Cas9 protein comprises an amino acid sequence having 4 motifs, each of motifs 1-4 having 95% or more amino acid sequence identity to motifs 1-4 of the Cas9 amino acid sequence set forth as SEQ ID NO:5 (the motifs are in Table 1, and are set forth as SEQ ID NOs: 1-4, respectively), or to the corresponding portions in any of the amino acid sequences set forth in SEQ ID NOs: 6-816. In some cases, a suitable Cas9 protein comprises an amino acid sequence having 4 motifs, each of motifs 1-4 having 99% or more amino acid sequence identity to motifs 1-4 of the Cas9 amino acid sequence set forth as SEQ ID NO:5 (the motifs are in Table 1, and are set forth as SEQ ID NOs: 1-4, respectively), or to the corresponding portions in any of the amino acid sequences set forth in SEQ ID NOs: 6-816. In some cases, a suitable Cas9 protein comprises an amino acid sequence having 4 motifs, each of motifs 1-4 having 100% amino acid sequence identity to motifs 1-4 of the Cas9 amino acid sequence set forth as SEQ ID NO:5 (the motifs are in Table 1, and are set forth as SEQ ID NOs: 1-4, respectively), or to the corresponding portions in any of the amino acid sequences set forth in SEQ ID NOs: 6-816. Any Cas9 protein as defined above can be used as a Cas9 polypeptide, as part of a chimeric Cas9 polypeptide (e.g., a Cas9 fusion protein), any of which can be used in an RNP of the present disclosure.

[0160] In some cases, a suitable Cas9 protein comprises an amino acid sequence having 60% or more, 70% or more, 75% or more, 80% or more, 85% or more, 90% or more, 95% or more, 99% or more or 100% amino acid sequence identity to amino acids 7-166 or 731-1003 of the Cas9 amino acid sequence set forth in SEQ ID NO:5, or to the corresponding portions in any of the amino acid sequences set forth as SEQ ID NOs: 6-816.

[0161] In some cases, a suitable Cas9 protein comprises an amino acid sequence having 60% or more amino acid sequence identity to amino acids 7-166 or 731-1003 of the Cas9 amino acid sequence set forth in SEQ ID NO:5, or to the corresponding portions in any of the amino acid sequences set forth as SEQ ID NOs: 6-816. In some cases, a suitable Cas9 protein comprises an amino acid sequence having 70% or more amino acid sequence identity to amino acids 7-166 or 731-1003 of the Cas9 amino acid sequence set forth in SEQ ID NO:5, or to the corresponding portions in any of the amino acid sequences set forth as SEQ ID NOs: 6-816. In some cases, a suitable Cas9 protein comprises an amino acid sequence having 75% or more amino acid sequence identity to amino acids 7-166 or 731-1003 of the Cas9 amino acid sequence set forth in SEQ ID NO:5, or to the corresponding portions in any of the amino acid sequences set forth as SEQ ID NOs: 6-816. In some cases, a suitable Cas9 protein comprises an amino acid sequence having 80% or more amino acid sequence identity to amino acids 7-166 or 731-1003 of the Cas9 amino acid sequence set forth in SEQ ID NO:5, or to the corresponding portions in any of the amino acid sequences set forth as SEQ ID NOs: 6-816. In some cases, a suitable Cas9 protein comprises an amino acid sequence having 85% or more amino acid sequence identity to amino acids 7-166 or 731-1003 of the Cas9 amino acid sequence set forth in SEQ ID NO:5, or to the corresponding portions in any of the amino acid sequences set forth as SEQ ID NOs: 6-816. In some cases, a suitable Cas9 protein comprises an amino acid sequence having 90% or more amino acid sequence identity to amino acids 7-166 or 731-1003 of the Cas9 amino acid sequence set forth in SEQ ID NO:5, or to the corresponding portions in any of the amino acid sequences set forth as SEQ ID NOs: 6-816. In some cases, a suitable Cas9 protein comprises an amino acid sequence having 95% or more amino acid sequence identity to amino acids 7-166 or 731-1003 of the Cas9 amino acid sequence set forth in SEQ ID NO:5, or to the corresponding portions in any of the amino acid sequences set forth as SEQ ID NOs: 6-816. In some cases, a suitable Cas9 protein comprises an amino acid sequence having 99% or more amino acid sequence identity to amino acids 7-166 or 731-1003 of the Cas9 amino acid sequence set forth in SEQ ID NO:5, or to the corresponding portions in any of the amino acid sequences set forth as SEQ ID NOs: 6-816. In some cases, a suitable Cas9 protein comprises an amino acid sequence having 100% amino acid sequence identity to amino acids 7-166 or 731-1003 of the Cas9 amino acid sequence set forth in SEQ ID NO:5, or to the corresponding portions in any of the amino acid sequences set forth as SEQ ID NOs: 6-816. Any Cas9 protein as defined above can be used as a Cas9 polypeptide, as part of a chimeric Cas9 polypeptide (e.g., a Cas9 fusion protein), any of which can be used in an RNP of the present disclosure

[0162] In some cases, a suitable Cas9 protein comprises an amino acid sequence having 60% or more, 70% or more, 75% or more, 80% or more, 85% or more, 90% or more, 95% or more, 99% or more or 100% amino acid sequence identity to the Cas9 amino acid sequence set forth in SEQ ID NO:5, or to any of the amino acid sequences set forth as SEQ ID NOs: 6-816.

[0163] In some cases, a suitable Cas9 protein comprises an amino acid sequence having 60% or more amino acid sequence identity to the Cas9 amino acid sequence set forth in SEQ ID NO:5, or to any of the amino acid sequences set forth as SEQ ID NOs: 6-816. In some cases, a suitable Cas9 protein comprises an amino acid sequence having 70% or more amino acid sequence identity to the Cas9 amino acid sequence set forth in SEQ ID NO:5, or to any of the amino acid sequences set forth as SEQ ID NOs: 6-816. In some cases, a suitable Cas9 protein comprises an amino acid sequence having 75% or more amino acid sequence identity to the Cas9 amino acid sequence set forth in SEQ ID NO:5, or to any of the amino acid sequences set forth as SEQ ID NOs: 6-816. In some cases, a suitable Cas9 protein comprises an amino acid sequence having 80% or more amino acid sequence identity to the Cas9 amino acid sequence set forth in SEQ ID NO:5, or to any of the amino acid sequences set forth as SEQ ID NOs: 6-816. In some cases, a suitable Cas9 protein comprises an amino acid sequence having 85% or more amino acid sequence identity to the Cas9 amino acid sequence set forth in SEQ ID NO:5, or to any of the amino acid sequences set forth as SEQ ID NOs: 6-816. In some cases, a suitable Cas9 protein comprises an amino acid sequence having 90% or more amino acid sequence identity to the Cas9 amino acid sequence set forth in SEQ ID NO:5, or to any of the amino acid sequences set forth as SEQ ID NOs: 6-816. In some cases, a suitable Cas9 protein comprises an amino acid sequence having 95% or more amino acid sequence identity to the Cas9 amino acid sequence set forth in SEQ ID NO:5, or to any of the amino acid sequences set forth as SEQ ID NOs: 6-816. In some cases, a suitable Cas9 protein comprises an amino acid sequence having 99% or more amino acid sequence identity to the Cas9 amino acid sequence set forth in SEQ ID NO:5, or to any of the amino acid sequences set forth as SEQ ID NOs: 6-816. In some cases, a suitable Cas9 protein comprises an amino acid sequence having 100% amino acid sequence identity to the Cas9 amino acid sequence set forth in SEQ ID NO:5, or to any of the amino acid sequences set forth as SEQ ID NOs: 6-816. Any Cas9 protein as defined above can be used as a Cas9 polypeptide, as part of a chimeric Cas9 polypeptide (e.g., a Cas9 fusion protein), any of which can be used in an RNP of the present disclosure.

[0164] In some cases, a Cas9 protein comprises 4 motifs (as listed in Table 1), at least one with (or each with) amino acid sequences having 75% or more, 80% or more, 85% or more, 90% or more, 95% or more, 99% or more or 100% amino acid sequence identity to each of the 4 motifs listed in Table 1 (SEQ ID NOs: 1-4), or to the corresponding portions in any of the amino acid sequences set forth as SEQ ID NOs: 6-816.

[0165] As used herein, the term “Cas9 protein” encompasses a “chimeric Cas9 protein.” As used herein, the term “Cas9 protein” encompasses a variant Cas9 that is a nickase. As used herein, the term “Cas9 protein” encompasses a variant Cas9 that exhibits reduced enzymatic activity (e.g., a “dead Cas9” or “dCas9”).

[0166] Variant Cas9 Proteins—Nickases and dCas9

[0167] In some cases, a Cas9 protein is a variant Cas9 protein. A variant Cas9 protein has an amino acid sequence that is different by at least one amino acid (e.g., has a deletion, insertion, substitution, fusion) when compared to the amino acid sequence of a corresponding wild type Cas9 protein. In some instances, the variant Cas9 protein has an amino acid change (e.g., deletion, insertion, or substitution) that reduces the nuclease activity of the Cas9 protein. For example, in some instances, the variant Cas9 protein has 50% or less, 40% or less, 30% or less, 20% or less, 10% or less, 5% or less, or 1% or less of the nuclease activity of the corresponding wild-type Cas9 protein. In some cases, the variant Cas9 protein has no substantial nuclease activity. When a Cas9 protein is a variant Cas9 protein that has no substantial nuclease activity, it can be referred to as “dCas9.” A protein (e.g., a class 2 CRISPR/Cas protein, e.g., a Cas9 protein) that cleaves one strand but not the other of a double stranded target nucleic acid is referred to herein as a “nickase” (e.g., a “nickase Cas9”).

[0168] In some cases, a variant Cas9 protein can cleave the complementary strand (sometimes referred to in the art as the target strand) of a target nucleic acid but has reduced ability to cleave the non-complementary strand (sometimes referred to in the art as the non-target strand) of a target nucleic acid. For example, the variant Cas9 protein can have a mutation (amino acid substitution) that reduces the function of the RuvC domain. Thus, the Cas9 protein can be a nickase that cleaves the complementary strand, but does not cleave the non-complementary strand. As a non-limiting example, in some embodiments, a variant Cas9 protein has a mutation at an amino acid position corresponding to residue D10 (e.g., D10A, aspartate to alanine) of SEQ ID NO:5 (or the corresponding position of any of the proteins set forth in SEQ ID NOs: 6-261 and 265-816) and can therefore cleave the complementary strand of a double stranded target nucleic acid but has reduced ability to cleave the non-complementary strand of a double stranded target nucleic acid (thus resulting in a single strand break (SSB) instead of a double strand break (DSB) when the variant Cas9 protein cleaves a double stranded target nucleic acid) (see, for example, Jinek et al., Science. 2012 Aug. 17; 337(6096):816-21). See, e.g., SEQ ID NO:262

[0169] In some cases, a variant Cas9 protein can cleave the non-complementary strand of a target nucleic acid but has reduced ability to cleave the complementary strand of the target nucleic acid. For example, the variant Cas9 protein can have a mutation (amino acid substitution) that reduces the function of the HNH domain. Thus, the Cas9 protein can be a nickase that cleaves the non-complementary strand, but does not cleave the complementary strand. As a non-limiting example, in some embodiments, the variant Cas9 protein has a mutation at an amino acid position corresponding to residue H840 (e.g., an H840A mutation, histidine to alanine) of SEQ ID NO:5 (or the corresponding position of any of the proteins set forth as SEQ ID NOs: 6-261 and 265-816) and can therefore cleave the non-complementary strand of the target nucleic acid but has reduced ability to cleave (e.g., does not cleave) the complementary strand of the target nucleic acid. Such a Cas9 protein has a reduced ability to cleave a target nucleic acid (e.g., a single stranded target nucleic acid) but retains the ability to bind a target nucleic acid (e.g., a single stranded target nucleic acid). See, e.g., SEQ ID NO:263

[0170] In some cases, a variant Cas9 protein has a reduced ability to cleave both the complementary and the non-complementary strands of a double stranded target nucleic acid. As a non-limiting example, in some cases, the variant Cas9 protein harbors mutations at amino acid positions corresponding to residues D10 and H840 (e.g., D10A and H840A) of SEQ ID NO:5 (or the corresponding residues of any of the proteins set forth as SEQ ID NOs: 6-261 and 265-816) such that the polypeptide has a reduced ability to cleave (e.g., does not cleave) both the complementary and the non-complementary strands of a target nucleic acid. Such a Cas9 protein has a reduced ability to cleave a target nucleic acid (e.g., a single stranded or double stranded target nucleic acid) but retains the ability to bind a target nucleic acid. A Cas9 protein that cannot cleave target nucleic acid (e.g., due to one or more mutations, e.g., in the catalytic domains of the RuvC and HNH domains) is referred to as a “dead” Cas9 or simply “dCas9.” See, e.g., SEQ ID NO:264

[0171] Other residues can be mutated to achieve the above effects (i.e. inactivate one or the other nuclease portions). As non-limiting examples, residues D10, G12, G17, E762, H840, N854, N863, H982, H983, A984, D986, and/or A987 of SEQ ID NO:5 (or the corresponding mutations of any of the proteins set forth as SEQ ID NOs: 6-816) can be altered (i.e., substituted). Also, mutations other than alanine substitutions are suitable.

[0172] In some embodiments, a variant Cas9 protein that has reduced catalytic activity (e.g., when a Cas9 protein has a D10, G12, G17, E762, H840, N854, N863, H982, H983, A984, D986, and/or a A987 mutation of SEQ ID NO:5 or the corresponding mutations of any of the proteins set forth as SEQ ID NOs: 6-816, e.g., D10A, G12A, G17A, E762A, H840A, N854A, N863A, H982A, H983A, A984A, and/or D986A), the variant Cas9 protein can still bind to target nucleic acid in a site-specific manner (because it is still guided to a target nucleic acid sequence by a Cas9 guide RNA) as long as it retains the ability to interact with the Cas9 guide RNA

[0173] In addition to the above, a variant Cas9 protein can have the same parameters for sequence identity as described above for Cas9 proteins. Thus, in some cases, a suitable variant Cas9 protein comprises an amino acid sequence having 4 motifs, each of motifs 1-4 having 60% or more, 70% or more, 75% or more, 80% or more, 85% or more, 90% or more, 95% or more, 99% or more or 100% amino acid sequence identity to motifs 1-4 of the Cas9 amino acid sequence set forth as SEQ ID NO:5 (the motifs are in Table 1, below, and are set forth as SEQ ID NOs: 1-4, respectively), or to the corresponding portions in any of the amino acid sequences set forth in SEQ ID NOs: 6-816.

[0174] In some cases, a suitable variant Cas9 protein comprises an amino acid sequence having 4 motifs, each of motifs 1-4 having 60% or more amino acid sequence identity to motifs 1-4 of the Cas9 amino acid sequence set forth as SEQ ID NO:5 (the motifs are in Table 1, below, and are set forth as SEQ ID NOs: 1-4, respectively), or to the corresponding portions in any of the amino acid sequences set forth in SEQ ID NOs: 6-816. In some cases, a suitable variant Cas9 protein comprises an amino acid sequence having 4 motifs, each of motifs 1-4 having 70% or more amino acid sequence identity to motifs 1-4 of the Cas9 amino acid sequence set forth as SEQ ID NO:5 (the motifs are in Table 1, below, and are set forth as SEQ ID NOs: 1-4, respectively), or to the corresponding portions in any of the amino acid sequences set forth in SEQ ID NOs: 6-816. In some cases, a suitable variant Cas9 protein comprises an amino acid sequence having 4 motifs, each of motifs 1-4 having 75% or more amino acid sequence identity to motifs 1-4 of the Cas9 amino acid sequence set forth as SEQ ID NO:5 (the motifs are in Table 1, below, and are set forth as SEQ ID NOs: 1-4, respectively), or to the corresponding portions in any of the amino acid sequences set forth in SEQ ID NOs: 6-816. In some cases, a suitable variant Cas9 protein comprises an amino acid sequence having 4 motifs, each of motifs 1-4 having 80% or more amino acid sequence identity to motifs 1-4 of the Cas9 amino acid sequence set forth as SEQ ID NO:5 (the motifs are in Table 1, below, and are set forth as SEQ ID NOs: 1-4, respectively), or to the corresponding portions in any of the amino acid sequences set forth in SEQ ID NOs: 6-816. In some cases, a suitable variant Cas9 protein comprises an amino acid sequence having 4 motifs, each of motifs 1-4 having 85% or more amino acid sequence identity to motifs 1-4 of the Cas9 amino acid sequence set forth as SEQ ID NO:5 (the motifs are in Table 1, below, and are set forth as SEQ ID NOs: 1-4, respectively), or to the corresponding portions in any of the amino acid sequences set forth in SEQ ID NOs: 6-816. In some cases, a suitable variant Cas9 protein comprises an amino acid sequence having 4 motifs, each of motifs 1-4 having 90% or more amino acid sequence identity to motifs 1-4 of the Cas9 amino acid sequence set forth as SEQ ID NO:5 (the motifs are in Table 1, below, and are set forth as SEQ ID NOs: 1-4, respectively), or to the corresponding portions in any of the amino acid sequences set forth in SEQ ID NOs: 6-816. In some cases, a suitable variant Cas9 protein comprises an amino acid sequence having 4 motifs, each of motifs 1-4 having 95% or more amino acid sequence identity to motifs 1-4 of the Cas9 amino acid sequence set forth as SEQ ID NO:5 (the motifs are in Table 1, below, and are set forth as SEQ ID NOs: 1-4, respectively), or to the corresponding portions in any of the amino acid sequences set forth in SEQ ID NOs: 6-816. In some cases, a suitable variant Cas9 protein comprises an amino acid sequence having 4 motifs, each of motifs 1-4 having 99% or more amino acid sequence identity to motifs 1-4 of the Cas9 amino acid sequence set forth as SEQ ID NO:5 (the motifs are in Table 1, below, and are set forth as SEQ ID NOs: 1-4, respectively), or to the corresponding portions in any of the amino acid sequences set forth in SEQ ID NOs: 6-816. In some cases, a suitable variant Cas9 protein comprises an amino acid sequence having 4 motifs, each of motifs 1-4 having 100% amino acid sequence identity to motifs 1-4 of the Cas9 amino acid sequence set forth as SEQ ID NO:5 (the motifs are in Table 1, below, and are set forth as SEQ ID NOs: 1-4, respectively), or to the corresponding portions in any of the amino acid sequences set forth in SEQ ID NOs: 6-816

[0175] In some cases, a suitable variant Cas9 protein comprises an amino acid sequence having 60% or more, 70% or more, 75% or more, 80% or more, 85% or more, 90% or more, 95% or more, 99% or more, or 100% amino acid sequence identity to amino acids 7-166 or 731-1003 of the Cas9 amino acid sequence set forth in SEQ ID NO:5, or to the corresponding portions in any of the amino acid sequences set forth as SEQ ID NOs: 6-816

[0176] In some cases, a suitable variant Cas9 protein comprises an amino acid sequence having 60% or more amino acid sequence identity to amino acids 7-166 or 731-1003 of the Cas9 amino acid sequence set forth in SEQ ID NO:5, or to the corresponding portions in any of the amino acid sequences set forth as SEQ ID NOs: 6-816. In some cases, a suitable variant Cas9 protein comprises an amino acid sequence having 70% or more amino acid sequence identity to amino acids 7-166 or 731-1003 of the Cas9 amino acid sequence set forth in SEQ ID NO:5, or to the corresponding portions in any of the amino acid sequences set forth as SEQ ID NOs: 6-816. In some cases, a suitable variant Cas9 protein comprises an amino acid sequence having 75% or more amino acid sequence identity to amino acids 7-166 or 731-1003 of the Cas9 amino acid sequence set forth in SEQ ID NO:5, or to the corresponding portions in any of the amino acid sequences set forth as SEQ ID NOs: 6-816. In some cases, a suitable variant Cas9 protein comprises an amino acid sequence having 80% or more amino acid sequence identity to amino acids 7-166 or 731-1003 of the Cas9 amino acid sequence set forth in SEQ ID NO:5, or to the corresponding portions in any of the amino acid sequences set forth as SEQ ID NOs: 6-816. In some cases, a suitable variant Cas9 protein comprises an amino acid sequence having 85% or more amino acid sequence identity to amino acids 7-166 or 731-1003 of the Cas9 amino acid sequence set forth in SEQ ID NO:5, or to the corresponding portions in any of the amino acid sequences set forth as SEQ ID NOs: 6-816. In some cases, a suitable variant Cas9 protein comprises an amino acid sequence having 90% or more amino acid sequence identity to amino acids 7-166 or 731-1003 of the Cas9 amino acid sequence set forth in SEQ ID NO:5, or to the corresponding portions in any of the amino acid sequences set forth as SEQ ID NOs: 6-816. In some cases, a suitable variant Cas9 protein comprises an amino acid sequence having 95% or more amino acid sequence identity to amino acids 7-166 or 731-1003 of the Cas9 amino acid sequence set forth in SEQ ID NO:5, or to the corresponding portions in any of the amino acid sequences set forth as SEQ ID NOs: 6-816. In some cases, a suitable variant Cas9 protein comprises an amino acid sequence having 99% or more amino acid sequence identity to amino acids 7-166 or 731-1003 of the Cas9 amino acid sequence set forth in SEQ ID NO:5, or to the corresponding portions in any of the amino acid sequences set forth as SEQ ID NOs: 6-816. In some cases, a suitable variant Cas9 protein comprises an amino acid sequence having 100% amino acid sequence identity to amino acids 7-166 or 731-1003 of the Cas9 amino acid sequence set forth in SEQ ID NO:5, or to the corresponding portions in any of the amino acid sequences set forth as SEQ ID NOs: 6-816.

[0177] In some cases, a suitable variant Cas9 protein comprises an amino acid sequence having 60% or more, 70% or more, 75% or more, 80% or more, 85% or more, 90% or more, 95% or more, 99% or more, or 100% amino acid sequence identity to the Cas9 amino acid sequence set forth in SEQ ID NO:5, or to any of the amino acid sequences set forth as SEQ ID NOs: 6-816. In some cases, a suitable variant Cas9 protein comprises an amino acid sequence having 60% or more amino acid sequence identity to the Cas9 amino acid sequence set forth in SEQ ID NO:5, or to any of the amino acid sequences set forth as SEQ ID NOs: 6-816. In some cases, a suitable variant Cas9 protein comprises an amino acid sequence having 70% or more amino acid sequence identity to the Cas9 amino acid sequence set forth in SEQ ID NO:5, or to any of the amino acid sequences set forth as SEQ ID NOs: 6-816. In some cases, a suitable variant Cas9 protein comprises an amino acid sequence having 75% or more amino acid sequence identity to the Cas9 amino acid sequence set forth in SEQ ID NO:5, or to any of the amino acid sequences set forth as SEQ ID NOs: 6-816. In some cases, a suitable variant Cas9 protein comprises an amino acid sequence having 80% or more amino acid sequence identity to the Cas9 amino acid sequence set forth in SEQ ID NO:5, or to any of the amino acid sequences set forth as SEQ ID NOs: 6-816. In some cases, a suitable variant Cas9 protein comprises an amino acid sequence having 85% or more amino acid sequence identity to the Cas9 amino acid sequence set forth in SEQ ID NO:5, or to any of the amino acid sequences set forth as SEQ ID NOs: 6-816. In some cases, a suitable variant Cas9 protein comprises an amino acid sequence having 90% or more amino acid sequence identity to the Cas9 amino acid sequence set forth in SEQ ID NO:5, or to any of the amino acid sequences set forth as SEQ ID NOs: 6-816. In some cases, a suitable variant Cas9 protein comprises an amino acid sequence having 95% or more amino acid sequence identity to the Cas9 amino acid sequence set forth in SEQ ID NO:5, or to any of the amino acid sequences set forth as SEQ ID NOs: 6-816. In some cases, a suitable variant Cas9 protein comprises an amino acid sequence having 99% or more amino acid sequence identity to the Cas9 amino acid sequence set forth in SEQ ID NO:5, or to any of the amino acid sequences set forth as SEQ ID NOs: 6-816. In some cases, a suitable variant Cas9 protein comprises an amino acid sequence having 100% amino acid sequence identity to the Cas9 amino acid sequence set forth in SEQ ID NO:5, or to any of the amino acid sequences set forth as SEQ ID NOs: 6-816.

[0178] Type V and Type VI CRISPR/Cas Endonucleases

[0179] In some cases, a genome targeting composition of the present disclosure includes a type V or type VI CRISPR/Cas endonuclease (i.e., the genome editing endonuclease is a type V or type VI CRISPR/Cas endonuclease) (e.g., Cpf1, C2c1, C2c2, C2c3). Type V and type VI CRISPR/Cas endonucleases are a type of class 2 CRISPR/Cas endonuclease. Examples of type V CRISPR/Cas endonucleases include but are not limited to: Cpf1, C2c1, and C2c3. An example of a type VI CRISPR/Cas endonuclease is C2c2. In some cases, a subject genome targeting composition includes a type V CRISPR/Cas endonuclease (e.g., Cpf1, C2c1, C2c3). In some cases, a Type V CRISPR/Cas endonuclease is a Cpf1 protein. In some cases, a subject genome targeting composition includes a type VI CRISPR/Cas endonuclease (e.g., C2c2)

[0180] Like type II CRISPR/Cas endonucleases, type V and VI CRISPR/Cas endonucleases form a complex with a corresponding guide RNA. The guide RNA provides target specificity to an endonuclease-guide RNA RNP complex by having a nucleotide sequence (a guide sequence) that is complementary to a sequence (the target site) of a target nucleic acid (as described elsewhere herein). The endonuclease of the complex provides the site-specific activity. In other words, the endonuclease is guided to a target site (e.g., stabilized at a target site) within a target nucleic acid sequence (e.g., a chromosomal sequence or an extrachromosomal sequence, e.g., an episomal sequence, a minicircle sequence, a mitochondrial sequence, a chloroplast sequence, etc.) by virtue of its association with the protein-binding segment of the guide RNA.

[0181] Examples and guidance related to type V and type VI CRISPR/Cas proteins (e.g., cpf1, C2c1, C2c2, and C2c3 guide RNAs) can be found in the art, for example, see Zetsche et al, Cell. 2015 Oct. 22; 163(3):759-71; Makarova et al, Nat Rev Microbiol. 2015 November; 13(11):722-36; and Shmakov et al., Mol Cell. 2015 Nov. 5; 60(3):385-97.

[0182] In some cases, the Type V or type VI CRISPR/Cas endonuclease (e.g., Cpf1, C2c1, C2c2, C2c3) is enzymatically active, e.g., the Type V or type VI CRISPR/Cas polypeptide, when bound to a guide RNA, cleaves a target nucleic acid. In some cases, the Type V or type VI CRISPR/Cas endonuclease (e.g., Cpf1, C2c1, C2c2, C2c3) exhibits reduced enzymatic activity relative to a corresponding wild-type a Type V or type VI CRISPR/Cas endonuclease (e.g., Cpf1, C2c1, C2c2, C2c3), and retains DNA binding activity.

[0183] In some cases a type V CRISPR/Cas endonuclease is a Cpf1 protein. In some cases, a Cpf1 protein comprises an amino acid sequence having at least 30%, at least 35%, at least 40%, at least 45%, at least 50%, at least 55%, at least 60%, at least 65%, at least 70%, at least 75%, at least 80%, at least 85%, at least 90%, at least 95%, at least 90%, or 100%, amino acid sequence identity to the Cpf1 amino acid sequence set forth in any of SEQ ID NOs: 1088-1092. In some cases, a Cpf1 protein comprises an amino acid sequence having at least 30%, at least 35%, at least 40%, at least 45%, at least 50%, at least 55%, at least 60%, at least 65%, at least 70%, at least 75%, at least 80%, at least 85%, at least 90%, at least 95%, at least 90%, or 100%, amino acid sequence identity to a contiguous stretch of from 100 amino acids to 200 amino acids (aa), from 200 aa to 400 aa, from 400 aa to 600 aa, from 600 aa to 800 aa, from 800 aa to 1000 aa, from 1000 aa to 1100 aa, from 1100 aa to 1200 aa, or from 1200 aa to 1300 aa, of the Cpf1 amino acid sequence set forth in any of SEQ ID NOs: 1088-1092

[0184] In some cases, a Cpf1 protein comprises an amino acid sequence having at least 30%, at least 35%, at least 40%, at least 45%, at least 50%, at least 55%, at least 60%, at least 65%, at least 70%, at least 75%, at least 80%, at least 85%, at least 90%, at least 95%, at least 90%, or 100%, amino acid sequence identity to the RuvCI domain of the Cpf1 amino acid sequence set forth in any of SEQ ID NOs: 1088-1092. In some cases, a Cpf1 protein comprises an amino acid sequence having at least 30%, at least 35%, at least 40%, at least 45%, at least 50%, at least 55%, at least 60%, at least 65%, at least 70%, at least 75%, at least 80%, at least 85%, at least 90%, at least 95%, at least 90%, or 100%, amino acid sequence identity to the RuvCII domain of the Cpf1 amino acid sequence set forth in any of SEQ ID NOs: 1088-1092. In some cases, a Cpf1 protein comprises an amino acid sequence having at least 30%, at least 35%, at least 40%, at least 45%, at least 50%, at least 55%, at least 60%, at least 65%, at least 70%, at least 75%, at least 80%, at least 85%, at least 90%, at least 95%, at least 90%, or 100%, amino acid sequence identity to the RuvCIII domain of the Cpf1 amino acid sequence set forth in any of SEQ ID NOs: 1088-1092. In some cases, a Cpf1 protein comprises an amino acid sequence having at least 30%, at least 35%, at least 40%, at least 45%, at least 50%, at least 55%, at least 60%, at least 65%, at least 70%, at least 75%, at least 80%, at least 85%, at least 90%, at least 95%, at least 90%, or 100%, amino acid sequence identity to the RuvCI, RuvCII, and RuvCIII domains of the Cpf1 amino acid sequence set forth in any of SEQ ID NOs: 1088-1092

[0185] In some cases, the Cpf1 protein exhibits reduced enzymatic activity relative to a wild-type Cpf1 protein (e.g., relative to a Cpf1 protein comprising the amino acid sequence set forth in any of SEQ ID NOs: 1088-1092), and retains DNA binding activity. In some cases, a Cpf1 protein comprises an amino acid sequence having at least 30%, at least 35%, at least 40%, at least 45%, at least 50%, at least 55%, at least 60%, at least 65%, at least 70%, at least 75%, at least 80%, at least 85%, at least 90%, at least 95%, at least 90%, or 100%, amino acid sequence identity to the Cpf1 amino acid sequence set forth in any of SEQ ID NOs: 1088-1092; and comprises an amino acid substitution (e.g., a D→A substitution) at an amino acid residue corresponding to amino acid 917 of the Cpf1 amino acid sequence set forth in SEQ ID NO: 1088. In some cases, a Cpf1 protein comprises an amino acid sequence having at least 30%, at least 35%, at least 40%, at least 45%, at least 50%, at least 55%, at least 60%, at least 65%, at least 70%, at least 75%, at least 80%, at least 85%, at least 90%, at least 95%, at least 90%, or 100%, amino acid sequence identity to the Cpf1 amino acid sequence set forth in any of SEQ ID NOs: 1088-1092; and comprises an amino acid substitution (e.g., an E→A substitution) at an amino acid residue corresponding to amino acid 1006 of the Cpf1 amino acid sequence set forth in SEQ ID NO: 1088. In some cases, a Cpf1 protein comprises an amino acid sequence having at least 30%, at least 35%, at least 40%, at least 45%, at least 50%, at least 55%, at least 60%, at least 65%, at least 70%, at least 75%, at least 80%, at least 85%, at least 90%, at least 95%, at least 90%, or 100%, amino acid sequence identity to the Cpf1 amino acid sequence set forth in any of SEQ ID NOs: 1088-1092; and comprises an amino acid substitution (e.g., a D→A substitution) at an amino acid residue corresponding to amino acid 1255 of the Cpf1 amino acid sequence set forth in SEQ ID NO: 1088

[0186] In some cases, a suitable Cpf1 protein comprises an amino acid sequence having at least 30%, at least 35%, at least 40%, at least 45%, at least 50%, at least 55%, at least 60%, at least 65%, at least 70%, at least 75%, at least 80%, at least 85%, at least 90%, at least 95%, at least 90%, or 100%, amino acid sequence identity to the Cpf1 amino acid sequence set forth in any of SEQ ID NOs: 1088-1092

[0187] In some cases a type V CRISPR/Cas endonuclease is a C2c1 protein (examples include those set forth as SEQ ID NOs: 1112-1119). In some cases, a C2c1 protein comprises an amino acid sequence having at least 30%, at least 35%, at least 40%, at least 45%, at least 50%, at least 55%, at least 60%, at least 65%, at least 70%, at least 75%, at least 80%, at least 85%, at least 90%, at least 95%, at least 90%, or 100%, amino acid sequence identity to the C2c1 amino acid sequence set forth in any of SEQ ID NOs: 1112-1119. In some cases, a C2c1 protein comprises an amino acid sequence having at least 30%, at least 35%, at least 40%, at least 45%, at least 50%, at least 55%, at least 60%, at least 65%, at least 70%, at least 75%, at least 80%, at least 85%, at least 90%, at least 95%, at least 90%, or 100%, amino acid sequence identity to a contiguous stretch of from 100 amino acids to 200 amino acids (aa), from 200 aa to 400 aa, from 400 aa to 600 aa, from 600 aa to 800 aa, from 800 aa to 1000 aa, from 1000 aa to 1100 aa, from 1100 aa to 1200 aa, or from 1200 aa to 1300 aa, of the C2c1 amino acid sequence set forth in any of SEQ ID NOs: 1112-1119

[0188] In some cases, a C2c1 protein comprises an amino acid sequence having at least 30%, at least 35%, at least 40%, at least 45%, at least 50%, at least 55%, at least 60%, at least 65%, at least 70%, at least 75%, at least 80%, at least 85%, at least 90%, at least 95%, at least 90%, or 100%, amino acid sequence identity to the RuvCI domain of the C2c1 amino acid sequences set forth in any of SEQ ID NOs: 1112-1119). In some cases, a C2c1 protein comprises an amino acid sequence having at least 30%, at least 35%, at least 40%, at least 45%, at least 50%, at least 55%, at least 60%, at least 65%, at least 70%, at least 75%, at least 80%, at least 85%, at least 90%, at least 95%, at least 90%, or 100%, amino acid sequence identity to the RuvCII domain of the C2c1 amino acid sequence set forth in any of SEQ ID NOs: 1112-1119. In some cases, a C2c1 protein comprises an amino acid sequence having at least 30%, at least 35%, at least 40%, at least 45%, at least 50%, at least 55%, at least 60%, at least 65%, at least 70%, at least 75%, at least 80%, at least 85%, at least 90%, at least 95%, at least 90%, or 100%, amino acid sequence identity to the RuvCIII domain of the C2c1 amino acid sequence set forth in any of SEQ ID NOs: 1112-1119. In some cases, a C2c1 protein comprises an amino acid sequence having at least 30%, at least 35%, at least 40%, at least 45%, at least 50%, at least 55%, at least 60%, at least 65%, at least 70%, at least 75%, at least 80%, at least 85%, at least 90%, at least 95%, at least 90%, or 100%, amino acid sequence identity to the RuvCI, RuvCII, and RuvCIII domains of the C2c1 amino acid sequence set forth in any of SEQ ID NOs: 1112-1119

[0189] In some cases, the C2c1 protein exhibits reduced enzymatic activity relative to a wild-type C2c1 protein (e.g., relative to a C2c1 protein comprising the amino acid sequence set forth in any of SEQ ID NOs: 1112-1119), and retains DNA binding activity. In some cases, a suitable C2c1 protein comprises an amino acid sequence having at least 30%, at least 35%, at least 40%, at least 45%, at least 50%, at least 55%, at least 60%, at least 65%, at least 70%, at least 75%, at least 80%, at least 85%, at least 90%, at least 95%, at least 90%, or 100%, amino acid sequence identity to the C2c1 amino acid sequence set forth in any of SEQ ID NOs: 1112-1119.

[0190] In some cases a type V CRISPR/Cas endonuclease is a C2c3 protein (examples include those set forth as SEQ ID NOs: 1120-1123). In some cases, a C2c3 protein comprises an amino acid sequence having at least 30%, at least 35%, at least 40%, at least 45%, at least 50%, at least 55%, at least 60%, at least 65%, at least 70%, at least 75%, at least 80%, at least 85%, at least 90%, at least 95%, at least 90%, or 100%, amino acid sequence identity to the C2c3 amino acid sequence set forth in any of SEQ ID NOs: 1120-1123. In some cases, a C2c3 protein comprises an amino acid sequence having at least 30%, at least 35%, at least 40%, at least 45%, at least 50%, at least 55%, at least 60%, at least 65%, at least 70%, at least 75%, at least 80%, at least 85%, at least 90%, at least 95%, at least 90%, or 100%, amino acid sequence identity to a contiguous stretch of from 100 amino acids to 200 amino acids (aa), from 200 aa to 400 aa, from 400 aa to 600 aa, from 600 aa to 800 aa, from 800 aa to 1000 aa, from 1000 aa to 1100 aa, from 1100 aa to 1200 aa, or from 1200 aa to 1300 aa, of the C2c3 amino acid sequence set forth in any of SEQ ID NOs: 1120-1123

[0191] In some cases, a C2c3 protein comprises an amino acid sequence having at least 30%, at least 35%, at least 40%, at least 45%, at least 50%, at least 55%, at least 60%, at least 65%, at least 70%, at least 75%, at least 80%, at least 85%, at least 90%, at least 95%, at least 90%, or 100%, amino acid sequence identity to the RuvCI domain of the C2c3 amino acid sequence set forth in any of SEQ ID NOs: 1120-1123. In some cases, a C2c3 protein comprises an amino acid sequence having at least 30%, at least 35%, at least 40%, at least 45%, at least 50%, at least 55%, at least 60%, at least 65%, at least 70%, at least 75%, at least 80%, at least 85%, at least 90%, at least 95%, at least 90%, or 100%, amino acid sequence identity to the RuvCII domain of the C2c3 amino acid sequence set forth in any of SEQ ID NOs: 1120-1123. In some cases, a C2c3 protein comprises an amino acid sequence having at least 30%, at least 35%, at least 40%, at least 45%, at least 50%, at least 55%, at least 60%, at least 65%, at least 70%, at least 75%, at least 80%, at least 85%, at least 90%, at least 95%, at least 90%, or 100%, amino acid sequence identity to the RuvCIII domain of the C2c3 amino acid sequence set forth in any of SEQ ID NOs: 1120-1123. In some cases, a C2c3 protein comprises an amino acid sequence having at least 30%, at least 35%, at least 40%, at least 45%, at least 50%, at least 55%, at least 60%, at least 65%, at least 70%, at least 75%, at least 80%, at least 85%, at least 90%, at least 95%, at least 90%, or 100%, amino acid sequence identity to the RuvCI, RuvCII, and RuvCIII domains of the C2c3 amino acid sequence set forth in any of SEQ ID NOs: 1120-1123.

[0192] In some cases, the C2c3 protein exhibits reduced enzymatic activity relative to a wild-type C2c3 protein (e.g., relative to a C2c3 protein comprising the amino acid sequence set forth in any of SEQ ID NOs: 1120-1123), and retains DNA binding activity. In some cases, a suitable C2c3 protein comprises an amino acid sequence having at least 30%, at least 35%, at least 40%, at least 45%, at least 50%, at least 55%, at least 60%, at least 65%, at least 70%, at least 75%, at least 80%, at least 85%, at least 90%, at least 95%, at least 90%, or 100%, amino acid sequence identity to the C2c3 amino acid sequence set forth in any of SEQ ID NOs: 1120-1123

[0193] In some cases a type VI CRISPR/Cas endonuclease is a C2c2 protein (examples include those set forth as SEQ ID NOs: 1124-1135). In some cases, a C2c2 protein comprises an amino acid sequence having at least 30%, at least 35%, at least 40%, at least 45%, at least 50%, at least 55%, at least 60%, at least 65%, at least 70%, at least 75%, at least 80%, at least 85%, at least 90%, at least 95%, at least 90%, or 100%, amino acid sequence identity to the C2c2 amino acid sequence set forth in any of SEQ ID NOs: 1124-1135. In some cases, a C2c2 protein comprises an amino acid sequence having at least 30%, at least 35%, at least 40%, at least 45%, at least 50%, at least 55%, at least 60%, at least 65%, at least 70%, at least 75%, at least 80%, at least 85%, at least 90%, at least 95%, at least 90%, or 100%, amino acid sequence identity to a contiguous stretch of from 100 amino acids to 200 amino acids (aa), from 200 aa to 400 aa, from 400 aa to 600 aa, from 600 aa to 800 aa, from 800 aa to 1000 aa, from 1000 aa to 1100 aa, from 1100 aa to 1200 aa, or from 1200 aa to 1300 aa, of the C2c2 amino acid sequence set forth in any of SEQ ID NOs: 1124-1135.

[0194] In some cases, a C2c2 protein comprises an amino acid sequence having at least 30%, at least 35%, at least 40%, at least 45%, at least 50%, at least 55%, at least 60%, at least 65%, at least 70%, at least 75%, at least 80%, at least 85%, at least 90%, at least 95%, at least 90%, or 100%, amino acid sequence identity to the RuvCI domain of the C2c2 amino acid sequence set forth in any of SEQ ID NOs: 1124-1135. In some cases, a C2c2 protein comprises an amino acid sequence having at least 30%, at least 35%, at least 40%, at least 45%, at least 50%, at least 55%, at least 60%, at least 65%, at least 70%, at least 75%, at least 80%, at least 85%, at least 90%, at least 95%, at least 90%, or 100%, amino acid sequence identity to the RuvCII domain of the C2c2 amino acid sequence set forth in any of SEQ ID NOs: 1124-1135. In some cases, a C2c2 protein comprises an amino acid sequence having at least 30%, at least 35%, at least 40%, at least 45%, at least 50%, at least 55%, at least 60%, at least 65%, at least 70%, at least 75%, at least 80%, at least 85%, at least 90%, at least 95%, at least 90%, or 100%, amino acid sequence identity to the RuvCIII domain of the C2c2 amino acid sequence set forth in any of SEQ ID NOs: 1124-1135. In some cases, a C2c2 protein comprises an amino acid sequence having at least 30%, at least 35%, at least 40%, at least 45%, at least 50%, at least 55%, at least 60%, at least 65%, at least 70%, at least 75%, at least 80%, at least 85%, at least 90%, at least 95%, at least 90%, or 100%, amino acid sequence identity to the RuvCI, RuvCII, and RuvCIII domains of the C2c2 amino acid sequence set forth in any of SEQ ID NOs: 1124-1135.

[0195] In some cases, the C2c2 protein exhibits reduced enzymatic activity relative to a wild-type C2c2 protein (e.g., relative to a C2c2 protein comprising the amino acid sequence set forth in any of SEQ ID NOs: 1124-1135), and retains DNA binding activity. In some cases, a suitable C2c2 protein comprises an amino acid sequence having at least 30%, at least 35%, at least 40%, at least 45%, at least 50%, at least 55%, at least 60%, at least 65%, at least 70%, at least 75%, at least 80%, at least 85%, at least 90%, at least 95%, at least 90%, or 100%, amino acid sequence identity to the C2c2 amino acid sequence set forth in any of SEQ ID NOs: 1124-1135.

### Guide RNA (for CRISPR/Cas Endonucleases)

[0196] A nucleic acid molecule that binds to a class 2 CRISPR/Cas endonuclease (e.g., a Cas9 protein; a type V or type VI CRISPR/Cas protein; a Cpf1 protein; etc.) and targets the complex to a specific location within a target nucleic acid is referred to herein as a “guide RNA” or “CRISPR/Cas guide nucleic acid” or “CRISPR/Cas guide RNA.”

[0197] A guide RNA provides target specificity to the complex (the RNP complex) by including a targeting segment, which includes a guide sequence (also referred to herein as a targeting sequence), which is a nucleotide sequence that is complementary to a sequence of a target nucleic acid

[0198] A guide RNA can be referred to by the protein to which it corresponds. For example, when the class 2 CRISPR/Cas endonuclease is a Cas9 protein, the corresponding guide RNA can be referred to as a “Cas9 guide RNA.” Likewise, as another example, when the class 2 CRISPR/Cas endonuclease is a Cpf1 protein, the corresponding guide RNA can be referred to as a “Cpf1 guide RNA.”

[0199] In some embodiments, a guide RNA includes two separate nucleic acid molecules: an “activator” and a “targeter” and is referred to herein as a “dual guide RNA”, a “double-molecule guide RNA”, a “two-molecule guide RNA”, or a “dgRNA.” In some embodiments, the guide RNA is one molecule (e.g., for some class 2 CRISPR/Cas proteins, the corresponding guide RNA is a single molecule; and in some cases, an activator and targeter are covalently linked to one another, e.g., via intervening nucleotides), and the guide RNA is referred to as a “single guide RNA”, a “single-molecule guide RNA,” a “one-molecule guide RNA”, or simply “sgRNA.”

[0200] Cas9 Guide RNA

[0201] A nucleic acid molecule that binds to a Cas9 protein and targets the complex to a specific location within a target nucleic acid is referred to herein as a “Cas9 guide RNA.”

[0202] A Cas9 guide RNA (can be said to include two segments, a first segment (referred to herein as a “targeting segment”); and a second segment (referred to herein as a “protein-binding segment”). By “segment” it is meant a segment/section/region of a molecule, e.g., a contiguous stretch of nucleotides in a nucleic acid molecule. A segment can also mean a region/section of a complex such that a segment may comprise regions of more than one molecule.

[0203] The first segment (targeting segment) of a Cas9 guide RNA includes a nucleotide sequence (a guide sequence) that is complementary to (and therefore hybridizes with) a specific sequence (a target site) within a target nucleic acid (e.g., a target ssRNA, a target ssDNA, the complementary strand of a double stranded target DNA, etc.). The protein-binding segment (or “protein-binding sequence”) interacts with (binds to) a Cas9 polypeptide. The protein-binding segment of a subject Cas9 guide RNA includes two complementary stretches of nucleotides that hybridize to one another to form a double stranded RNA duplex (dsRNA duplex). Site-specific binding and/or cleavage of a target nucleic acid (e.g., genomic DNA) can occur at locations (e.g., target sequence of a target locus) determined by base-pairing complementarity between the Cas9 guide RNA (the guide sequence of the Cas9 guide RNA) and the target nucleic acid

[0204] A Cas9 guide RNA and a Cas9 protein form a complex (e.g., bind via non-covalent interactions). The Cas9 guide RNA provides target specificity to the complex by including a targeting segment, which includes a guide sequence (a nucleotide sequence that is complementary to a sequence of a target nucleic acid). The Cas9 protein of the complex provides the site-specific activity (e.g., cleavage activity or an activity provided by the Cas9 protein when the Cas9 protein is a Cas9 fusion polypeptide, i.e., has a fusion partner). In other words, the Cas9 protein is guided to a target nucleic acid sequence (e.g., a target sequence in a chromosomal nucleic acid, e.g., a chromosome; a target sequence in an extrachromosomal nucleic acid, e.g., an episomal nucleic acid, a minicircle, an ssRNA, an ssDNA, etc.; a target sequence in a mitochondrial nucleic acid; a target sequence in a chloroplast nucleic acid; a target sequence in a plasmid; a target sequence in a viral nucleic acid; etc.) by virtue of its association with the Cas9 guide RNA.

[0205] The “guide sequence” also referred to as the “targeting sequence” of a Cas9 guide RNA can be modified so that the Cas9 guide RNA can target a Cas9 protein to any desired sequence of any desired target nucleic acid, with the exception that the protospacer adjacent motif (PAM) sequence can be taken into account. Thus, for example, a Cas9 guide RNA can have a targeting segment with a sequence (a guide sequence) that has complementarity with (e.g., can hybridize to) a sequence in a nucleic acid in a eukaryotic cell, e.g., a viral nucleic acid, a eukaryotic nucleic acid (e.g., a eukaryotic chromosome, chromosomal sequence, a eukaryotic RNA, etc.), and the like.

[0206] In some embodiments, a Cas9 guide RNA includes two separate nucleic acid molecules: an “activator” and a “targeter” and is referred to herein as a “dual Cas9 guide RNA”, a “double-molecule Cas9 guide RNA”, or a “two-molecule Cas9 guide RNA” a “dual guide RNA”, or a “dgRNA.” In some embodiments, the activator and targeter are covalently linked to one another (e.g., via intervening nucleotides) and the guide RNA is referred to as a “single guide RNA”, a “Cas9 single guide RNA”, a “single-molecule Cas9 guide RNA,” or a “one-molecule Cas9 guide RNA”, or simply “sgRNA.”

[0207] A Cas9 guide RNA comprises a crRNA-like (“CRISPR RNA”/“targeter”/“crRNA”/“crRNA repeat”) molecule and a corresponding tracrRNA-like (“trans-acting CRISPR RNA”/“activator”/“tracrRNA”) molecule. A crRNA-like molecule (targeter) comprises both the targeting segment (single stranded) of the Cas9 guide RNA and a stretch (“duplex-forming segment”) of nucleotides that forms one half of the dsRNA duplex of the protein-binding segment of the Cas9 guide RNA. A corresponding tracrRNA-like molecule (activator/tracrRNA) comprises a stretch of nucleotides (duplex-forming segment) that forms the other half of the dsRNA duplex of the protein-binding segment of the guide nucleic acid. In other words, a stretch of nucleotides of a crRNA-like molecule are complementary to and hybridize with a stretch of nucleotides of a tracrRNA-like molecule to form the dsRNA duplex of the protein-binding domain of the Cas9 guide RNA. As such, each targeter molecule can be said to have a corresponding activator molecule (which has a region that hybridizes with the targeter). The targeter molecule additionally provides the targeting segment. Thus, a targeter and an activator molecule (as a corresponding pair) hybridize to form a Cas9 guide RNA. The exact sequence of a given crRNA or tracrRNA molecule is characteristic of the species in which the RNA molecules are found. A subject dual Cas9 guide RNA can include any corresponding activator and targeter pair.

[0208] The term “activator” or “activator RNA” is used herein to mean a tracrRNA-like molecule (tracrRNA: “trans-acting CRISPR RNA”) of a Cas9 dual guide RNA (and therefore of a Cas9 single guide RNA when the “activator” and the “targeter” are linked together by, e.g., intervening nucleotides). Thus, for example, a Cas9 guide RNA (dgRNA or sgRNA) comprises an activator sequence (e.g., a tracrRNA sequence). A tracr molecule (a tracrRNA) is a naturally existing molecule that hybridizes with a CRISPR RNA molecule (a crRNA) to form a Cas9 dual guide RNA. The term “activator” is used herein to encompass naturally existing tracrRNAs, but also to encompass tracrRNAs with modifications (e.g., truncations, sequence variations, base modifications, backbone modifications, linkage modifications, etc.) where the activator retains at least one function of a tracrRNA (e.g., contributes to the dsRNA duplex to which Cas9 protein binds). In some cases the activator provides one or more stem loops that can interact with Cas9 protein. An activator can be referred to as having a tracr sequence (tracrRNA sequence) and in some cases is a tracrRNA, but the term “activator” is not limited to naturally existing tracrRNAs.

[0209] The term “targeter” or “targeter RNA” is used herein to refer to a crRNA-like molecule (crRNA: “CRISPR RNA”) of a Cas9 dual guide RNA (and therefore of a Cas9 single guide RNA when the “activator” and the “targeter” are linked together, e.g., by intervening nucleotides). Thus, for example, a Cas9 guide RNA (dgRNA or sgRNA) comprises a targeting segment (which includes nucleotides that hybridize with (are complementary to) a target nucleic acid, and a duplex-forming segment (e.g., a duplex forming segment of a crRNA, which can also be referred to as a crRNA repeat). Because the sequence of a targeting segment (the segment that hybridizes with a target sequence of a target nucleic acid) of a targeter is modified by a user to hybridize with a desired target nucleic acid, the sequence of a targeter will often be a non-naturally occurring sequence. However, the duplex-forming segment of a targeter (described in more detail below), which hybridizes with the duplex-forming segment of an activator, can include a naturally existing sequence (e.g., can include the sequence of a duplex-forming segment of a naturally existing crRNA, which can also be referred to as a crRNA repeat). Thus, the term targeter is used herein to distinguish from naturally occurring crRNAs, despite the fact that part of a targeter (e.g., the duplex-forming segment) often includes a naturally occurring sequence from a crRNA. However, the term “targeter” encompasses naturally occurring crRNAs.

[0210] A Cas9 guide RNA can also be said to include 3 parts: (i) a targeting sequence (a nucleotide sequence that hybridizes with a sequence of the target nucleic acid); (ii) an activator sequence (as described above)(in some cases, referred to as a tracr sequence); and (iii) a sequence that hybridizes to at least a portion of the activator sequence to form a double stranded duplex. A targeter has (i) and (iii); while an activator has (ii).

[0211] A Cas9 guide RNA (e.g., a dual guide RNA or a single guide RNA) can be comprised of any corresponding activator and targeter pair. In some cases, the duplex forming segments can be swapped between the activator and the targeter. In other words, in some cases, the targeter includes a sequence of nucleotides from a duplex forming segment of a tracrRNA (which sequence would normally be part of an activator) while the activator includes a sequence of nucleotides from a duplex forming segment of a crRNA (which sequence would normally be part of a targeter).

[0212] As noted above, a targeter comprises both the targeting segment (single stranded) of the Cas9 guide RNA and a stretch (“duplex-forming segment”) of nucleotides that forms one half of the dsRNA duplex of the protein-binding segment of the Cas9 guide RNA. A corresponding tracrRNA-like molecule (activator) comprises a stretch of nucleotides (a duplex-forming segment) that forms the other half of the dsRNA duplex of the protein-binding segment of the Cas9 guide RNA. In other words, a stretch of nucleotides of the targeter is complementary to and hybridizes with a stretch of nucleotides of the activator to form the dsRNA duplex of the protein-binding segment of a Cas9 guide RNA. As such, each targeter can be said to have a corresponding activator (which has a region that hybridizes with the targeter). The targeter molecule additionally provides the targeting segment. Thus, a targeter and an activator (as a corresponding pair) hybridize to form a Cas9 guide RNA. The particular sequence of a given naturally existing crRNA or tracrRNA molecule is characteristic of the species in which the RNA molecules are found. Examples of suitable activator and targeter are well known in the art.

[0213] A Cas9 guide RNA (e.g., a dual guide RNA or a single guide RNA) can be comprised of any corresponding activator and targeter pair. Non-limiting examples of nucleotide sequences that can be included in a Cas9 guide RNA (dgRNA or sgRNA) include sequences set forth in SEQ ID NOs: 827-1075, or complements thereof. For example, in some cases, sequences from SEQ ID NOs: 827-957 (which are from tracrRNAs) or complements thereof, can pair with sequences from SEQ ID NOs: 964-1075 (which are from crRNAs), or complements thereof, to form a dsRNA duplex of a protein binding segment.

[0214] Targeting Segment of a Cas9 Guide RNA

[0215] The first segment of a subject guide nucleic acid includes a guide sequence (i.e., a targeting sequence)(a nucleotide sequence that is complementary to a sequence (a target site) in a target nucleic acid). In other words, the targeting segment of a subject guide nucleic acid can interact with a target nucleic acid (e.g., double stranded DNA (dsDNA)) in a sequence-specific manner via hybridization (i.e., base pairing). As such, the nucleotide sequence of the targeting segment may vary (depending on the target) and can determine the location within the target nucleic acid that the Cas9 guide RNA and the target nucleic acid will interact. The targeting segment of a Cas9 guide RNA can be modified (e.g., by genetic engineering)/designed to hybridize to any desired sequence (target site) within a target nucleic acid (e.g., a eukaryotic target nucleic acid such as genomic DNA).

[0216] The targeting segment can have a length of 7 or more nucleotides (nt) (e.g., 8 or more, 9 or more, 10 or more, 12 or more, 15 or more, 20 or more, 25 or more, 30 or more, or 40 or more nucleotides). In some cases, the targeting segment can have a length of from 7 to 100 nucleotides (nt) (e.g., from 7 to 80 nt, from 7 to 60 nt, from 7 to 40 nt, from 7 to 30 nt, from 7 to 25 nt, from 7 to 22 nt, from 7 to 20 nt, from 7 to 18 nt, from 8 to 80 nt, from 8 to 60 nt, from 8 to 40 nt, from 8 to 30 nt, from 8 to 25 nt, from 8 to 22 nt, from 8 to 20 nt, from 8 to 18 nt, from 10 to 100 nt, from 10 to 80 nt, from 10 to 60 nt, from 10 to 40 nt, from 10 to 30 nt, from 10 to 25 nt, from 10 to 22 nt, from 10 to 20 nt, from 10 to 18 nt, from 12 to 100 nt, from 12 to 80 nt, from 12 to 60 nt, from 12 to 40 nt, from 12 to 30 nt, from 12 to 25 nt, from 12 to 22 nt, from 12 to 20 nt, from 12 to 18 nt, from 14 to 100 nt, from 14 to 80 nt, from 14 to 60 nt, from 14 to 40 nt, from 14 to 30 nt, from 14 to 25 nt, from 14 to 22 nt, from 14 to 20 nt, from 14 to 18 nt, from 16 to 100 nt, from 16 to 80 nt, from 16 to 60 nt, from 16 to 40 nt, from 16 to 30 nt, from 16 to 25 nt, from 16 to 22 nt, from 16 to 20 nt, from 16 to 18 nt, from 18 to 100 nt, from 18 to 80 nt, from 18 to 60 nt, from 18 to 40 nt, from 18 to 30 nt, from 18 to 25 nt, from 18 to 22 nt, or from 18 to 20 nt)

[0217] The nucleotide sequence (the targeting sequence) of the targeting segment that is complementary to a nucleotide sequence (target site) of the target nucleic acid can have a length of 10 nt or more. For example, the targeting sequence of the targeting segment that is complementary to a target site of the target nucleic acid can have a length of 12 nt or more, 15 nt or more, 18 nt or more, 19 nt or more, or 20 nt or more. In some cases, the nucleotide sequence (the targeting sequence) of the targeting segment that is complementary to a nucleotide sequence (target site) of the target nucleic acid has a length of 12 nt or more. In some cases, the nucleotide sequence (the targeting sequence) of the targeting segment that is complementary to a nucleotide sequence (target site) of the target nucleic acid has a length of 18 nt or more.

[0218] For example, the targeting sequence of the targeting segment that is complementary to a target sequence of the target nucleic acid can have a length of from 10 to 100 nucleotides (nt) (e.g., from 10 to 90 nt, from 10 to 75 nt, from 10 to 60 nt, from 10 to 50 nt, from 10 to 35 nt, from 10 to 30 nt, from 10 to 25 nt, from 10 to 22 nt, from 10 to 20 nt, from 12 to 100 nt, from 12 to 90 nt, from 12 to 75 nt, from 12 to 60 nt, from 12 to 50 nt, from 12 to 35 nt, from 12 to 30 nt, from 12 to 25 nt, from 12 to 22 nt, from 12 to 20 nt, from 15 to 100 nt, from 15 to 90 nt, from 15 to 75 nt, from 15 to 60 nt, from 15 to 50 nt, from 15 to 35 nt, from 15 to 30 nt, from 15 to 25 nt, from 15 to 22 nt, from 15 to 20 nt, from 17 to 100 nt, from 17 to 90 nt, from 17 to 75 nt, from 17 to 60 nt, from 17 to 50 nt, from 17 to 35 nt, from 17 to 30 nt, from 17 to 25 nt, from 17 to 22 nt, from 17 to 20 nt, from 18 to 100 nt, from 18 to 90 nt, from 18 to 75 nt, from 18 to 60 nt, from 18 to 50 nt, from 18 to 35 nt, from 18 to 30 nt, from 18 to 25 nt, from 18 to 22 nt, or from 18 to 20 nt). In some cases, the targeting sequence of the targeting segment that is complementary to a target sequence of the target nucleic acid has a length of from 15 nt to 30 nt. In some cases, the targeting sequence of the targeting segment that is complementary to a target sequence of the target nucleic acid has a length of from 15 nt to 25 nt. In some cases, the targeting sequence of the targeting segment that is complementary to a target sequence of the target nucleic acid has a length of from 18 nt to 30 nt. In some cases, the targeting sequence of the targeting segment that is complementary to a target sequence of the target nucleic acid has a length of from 18 nt to 25 nt. In some cases, the targeting sequence of the targeting segment that is complementary to a target sequence of the target nucleic acid has a length of from 18 nt to 22 nt. In some cases, the targeting sequence of the targeting segment that is complementary to a target site of the target nucleic acid is 20 nucleotides in length. In some cases, the targeting sequence of the targeting segment that is complementary to a target site of the target nucleic acid is 19 nucleotides in length.

[0219] The percent complementarity between the targeting sequence (guide sequence) of the targeting segment and the target site of the target nucleic acid can be 60% or more (e.g., 65% or more, 70% or more, 75% or more, 80% or more, 85% or more, 90% or more, 95% or more, 97% or more, 98% or more, 99% or more, or 100%). In some cases, the percent complementarity between the targeting sequence of the targeting segment and the target site of the target nucleic acid is 100% over the seven contiguous 5′-most nucleotides of the target site of the target nucleic acid. In some cases, the percent complementarity between the targeting sequence of the targeting segment and the target site of the target nucleic acid is 60% or more over about 20 contiguous nucleotides. In some cases, the percent complementarity between the targeting sequence of the targeting segment and the target site of the target nucleic acid is 100% over the fourteen contiguous 5′-most nucleotides of the target site of the target nucleic acid and as low as 0% or more over the remainder. In such a case, the targeting sequence can be considered to be 14 nucleotides in length. In some cases, the percent complementarity between the targeting sequence of the targeting segment and the target site of the target nucleic acid is 100% over the seven contiguous 5′-most nucleotides of the target site of the target nucleic acid and as low as 0% or more over the remainder. In such a case, the targeting sequence can be considered to be 20 nucleotides in length.

[0220] In some cases, the percent complementarity between the targeting sequence of the targeting segment and the target site of the target nucleic acid is 100% over the 7 contiguous 5′-most nucleotides of the target site of the target nucleic acid (which can be complementary to the 3′-most nucleotides of the targeting sequence of the Cas9 guide RNA). In some cases, the percent complementarity between the targeting sequence of the targeting segment and the target site of the target nucleic acid is 100% over the 8 contiguous 5′-most nucleotides of the target site of the target nucleic acid (which can be complementary to the 3′-most nucleotides of the targeting sequence of the Cas9 guide RNA). In some cases, the percent complementarity between the targeting sequence of the targeting segment and the target site of the target nucleic acid is 100% over the 9 contiguous 5′-most nucleotides of the target site of the target nucleic acid (which can be complementary to the 3′-most nucleotides of the targeting sequence of the Cas9 guide RNA). In some cases, the percent complementarity between the targeting sequence of the targeting segment and the target site of the target nucleic acid is 100% over the 10 contiguous 5′-most nucleotides of the target site of the target nucleic acid (which can be complementary to the 3′-most nucleotides of the targeting sequence of the Cas9 guide RNA). In some cases, the percent complementarity between the targeting sequence of the targeting segment and the target site of the target nucleic acid is 100% over the 17 contiguous 5′-most nucleotides of the target site of the target nucleic acid (which can be complementary to the 3′-most nucleotides of the targeting sequence of the Cas9 guide RNA). In some cases, the percent complementarity between the targeting sequence of the targeting segment and the target site of the target nucleic acid is 100% over the 18 contiguous 5′-most nucleotides of the target site of the target nucleic acid (which can be complementary to the 3′-most nucleotides of the targeting sequence of the Cas9 guide RNA). In some cases, the percent complementarity between the targeting sequence of the targeting segment and the target site of the target nucleic acid is 60% or more (e.g., e.g., 65% or more, 70% or more, 75% or more, 80% or more, 85% or more, 90% or more, 95% or more, 97% or more, 98% or more, 99% or more, or 100%) over about 20 contiguous nucleotides.

[0221] In some cases, the percent complementarity between the targeting sequence of the targeting segment and the target site of the target nucleic acid is 100% over the 7 contiguous 5′-most nucleotides of the target site of the target nucleic acid and as low as 0% or more over the remainder. In such a case, the targeting sequence can be considered to be 7 nucleotides in length. In some cases, the percent complementarity between the targeting sequence of the targeting segment and the target site of the target nucleic acid is 100% over the 8 contiguous 5′-most nucleotides of the target site of the target nucleic acid and as low as 0% or more over the remainder. In such a case, the targeting sequence can be considered to be 8 nucleotides in length. In some cases, the percent complementarity between the targeting sequence of the targeting segment and the target site of the target nucleic acid is 100% over the 9 contiguous 5′-most nucleotides of the target site of the target nucleic acid and as low as 0% or more over the remainder. In such a case, the targeting sequence can be considered to be 9 nucleotides in length. In some cases, the percent complementarity between the targeting sequence of the targeting segment and the target site of the target nucleic acid is 100% over the 10 contiguous 5′-most nucleotides of the target site of the target nucleic acid and as low as 0% or more over the remainder. In such a case, the targeting sequence can be considered to be 10 nucleotides in length. In some cases, the percent complementarity between the targeting sequence of the targeting segment and the target site of the target nucleic acid is 100% over the 11 contiguous 5′-most nucleotides of the target site of the target nucleic acid and as low as 0% or more over the remainder. In such a case, the targeting sequence can be considered to be 11 nucleotides in length. In some cases, the percent complementarity between the targeting sequence of the targeting segment and the target site of the target nucleic acid is 100% over the 12 contiguous 5′-most nucleotides of the target site of the target nucleic acid and as low as 0% or more over the remainder. In such a case, the targeting sequence can be considered to be 12 nucleotides in length. In some cases, the percent complementarity between the targeting sequence of the targeting segment and the target site of the target nucleic acid is 100% over the 13 contiguous 5′-most nucleotides of the target site of the target nucleic acid and as low as 0% or more over the remainder. In such a case, the targeting sequence can be considered to be 13 nucleotides in length. In some cases, the percent complementarity between the targeting sequence of the targeting segment and the target site of the target nucleic acid is 100% over the 14 contiguous 5′-most nucleotides of the target site of the target nucleic acid and as low as 0% or more over the remainder. In such a case, the targeting sequence can be considered to be 14 nucleotides in length. In some cases, the percent complementarity between the targeting sequence of the targeting segment and the target site of the target nucleic acid is 100% over the 17 contiguous 5′-most nucleotides of the target site of the target nucleic acid and as low as 0% or more over the remainder. In such a case, the targeting sequence can be considered to be 17 nucleotides in length. In some cases, the percent complementarity between the targeting sequence of the targeting segment and the target site of the target nucleic acid is 100% over the 18 contiguous 5′-most nucleotides of the target site of the target nucleic acid and as low as 0% or more over the remainder. In such a case, the targeting sequence can be considered to be 18 nucleotides in length.

### Protein-Binding Segment of a Cas9 Guide RNA

[0222] The protein-binding segment of a subject Cas9 guide RNA interacts with a Cas9 protein. The Cas9 guide RNA guides the bound Cas9 protein to a specific nucleotide sequence within target nucleic acid via the above mentioned targeting segment. The protein-binding segment of a Cas9 guide RNA comprises two stretches of nucleotides that are complementary to one another and hybridize to form a double stranded RNA duplex (dsRNA duplex). Thus, the protein-binding segment includes a dsRNA duplex. In some cases, the protein-binding segment also includes stem loop 1 (the “nexus”) of a Cas9 guide RNA. For example, in some cases, the activator of a Cas9 guide RNA (dgRNA or sgRNA) includes (i) a duplex forming segment that contributes to the dsRNA duplex of the protein-binding segment; and (ii) nucleotides 3′ of the duplex forming segment, e.g., that form stem loop 1 (the “nexus”). For example, in some cases, the protein-binding segment includes stem loop 1 (the “nexus”) of a Cas9 guide RNA. In some cases, the protein-binding segment includes 5 or more nucleotides (nt) (e.g., 6 or more, 7 or more, 8 or more, 9 or more, 10 or more, 11 or more, 12 or more, 15 or more, 20 or more, 30 or more, 40 or more, 50 or more, 60 or more, 70 or more, 75 or more, or 80 or more nt) 3′ of the dsRNA duplex (where 3′ is relative to the duplex-forming segment of the activator sequence).

[0223] The dsRNA duplex of the guide RNA (sgRNA or dgRNA) that forms between the activator and targeter is sometimes referred to herein as the “stem loop”. In addition, the activator (activator RNA, tracrRNA) of many naturally existing Cas9 guide RNAs (e.g., S. pygogenes guide RNAs) has 3 stem loops (3 hairpins) that are 3′ of the duplex-forming segment of the activator. The closest stem loop to the duplex-forming segment of the activator (3′ of the duplex forming segment) is called “stem loop 1” (and is also referred to herein as the “nexus”); the next stem loop is called “stem loop 2” (and is also referred to herein as the “hairpin 1”); and the next stem loop is called “stem loop 3” (and is also referred to herein as the “hairpin 2”).

[0224] In some cases, a Cas9 guide RNA (sgRNA or dgRNA) (e.g., a full length Cas9 guide RNA) has stem loops 1, 2, and 3. In some cases, an activator (of a Cas9 guide RNA) has stem loop 1, but does not have stem loop 2 and does not have stem loop 3. In some cases, an activator (of a Cas9 guide RNA) has stem loop 1 and stem loop 2, but does not have stem loop 3. In some cases, an activator (of a Cas9 guide RNA) has stem loops 1, 2, and 3.

[0225] In some cases, the activator (e.g., tracr sequence) of a Cas9 guide RNA (dgRNA or sgRNA) includes (i) a duplex forming segment that contributes to the dsRNA duplex of the protein-binding segment; and (ii) a stretch of nucleotides (e.g., referred to herein as a 3′ tail) 3′ of the duplex forming segment. In some cases, the additional nucleotides 3′ of the duplex forming segment form stem loop 1. In some cases, the activator (e.g., tracr sequence) of a Cas9 guide RNA (dgRNA or sgRNA) includes (i) a duplex forming segment that contributes to the dsRNA duplex of the protein-binding segment; and (ii) 5 or more nucleotides (e.g., 6 or more, 7 or more, 8 or more, 9 or more, 10 or more, 11 or more, 12 or more, 13 or more, 14 or more, 15 or more, 20 or more, 25 or more, 30 or more, 35 or more, 40 or more, 45 or more, 50 or more, 60 or more, 70 or more, or 75 or more nucleotides) 3′ of the duplex forming segment. In some cases, the activator (activator RNA) of a Cas9 guide RNA (dgRNA or sgRNA) includes (i) a duplex forming segment that contributes to the dsRNA duplex of the protein-binding segment; and (ii) 5 or more nucleotides (e.g., 6 or more, 7 or more, 8 or more, 9 or more, 10 or more, 11 or more, 12 or more, 13 or more, 14 or more, 15 or more, 20 or more, 25 or more, 30 or more, 35 or more, 40 or more, 45 or more, 50 or more, 60 or more, 70 or more, or 75 or more nucleotides) 3′ of the duplex forming segment.

[0226] In some cases, the activator (e.g., tracr sequence) of a Cas9 guide RNA (dgRNA or sgRNA) includes (i) a duplex forming segment that contributes to the dsRNA duplex of the protein-binding segment; and (ii) a stretch of nucleotides (e.g., referred to herein as a 3′ tail) 3′ of the duplex forming segment. In some cases, the stretch of nucleotides 3′ of the duplex forming segment has a length in a range of from 5 to 200 nucleotides (nt) (e.g., from 5 to 150 nt, from 5 to 130 nt, from 5 to 120 nt, from 5 to 100 nt, from 5 to 80 nt, from 10 to 200 nt, from 10 to 150 nt, from 10 to 130 nt, from 10 to 120 nt, from 10 to 100 nt, from 10 to 80 nt, from 12 to 200 nt, from 12 to 150 nt, from 12 to 130 nt, from 12 to 120 nt, from 12 to 100 nt, from 12 to 80 nt, from 15 to 200 nt, from 15 to 150 nt, from 15 to 130 nt, from 15 to 120 nt, from 15 to 100 nt, from 15 to 80 nt, from 20 to 200 nt, from 20 to 150 nt, from 20 to 130 nt, from 20 to 120 nt, from 20 to 100 nt, from 20 to 80 nt, from 30 to 200 nt, from 30 to 150 nt, from 30 to 130 nt, from 30 to 120 nt, from 30 to 100 nt, or from 30 to 80 nt). In some cases, the nucleotides of the 3′ tail of an activator RNA are wild type sequences. Although a number of different alternative sequences can be used, an example Cas9 single guide RNA (based on crRNA and tracrRNA from S. pyogenes, where the dsRNA duplex of the protein-binding segment is truncated relative to the dsRNA duplex present in the wild type dual guide RNA) can include the sequence set forth in SEQ ID NO:958 (This example sequence does not include the guide sequence. The guide sequence, which varies depending on the target, would be 5′ of this example sequence. The activator in this example is 66 nucleotides long).

[0227] Examples of various Cas9 proteins and Cas9 guide RNAs (as well as information regarding requirements related to protospacer adjacent motif (PAM) sequences present in targeted nucleic acids) can be found in the art, for example, see Jinek et al., Science. 2012 Aug. 17; 337(6096):816-21; Chylinski et al., RNA Biol. 2013 May; 10(5):726-37; Ma et al., Biomed Res Int. 2013; 2013:270805; Hou et al., Proc Natl Acad Sci USA. 2013 Sep. 24; 110(39):15644-9; Jinek et al., Elife. 2013; 2:e00471; Pattanayak et al., Nat Biotechnol. 2013 September; 31(9):839-43; Qi et al, Cell. 2013 Feb. 28; 152(5):1173-83; Wang et al., Cell. 2013 May 9; 153(4):910-8; Auer et. al., Genome Res. 2013 Oct. 31; Chen et. al., Nucleic Acids Res. 2013 Nov. 1; 41(20):e19; Cheng et. al., Cell Res. 2013 October; 23(10):1163-71; Cho et. al., Genetics. 2013 November; 195(3):1177-80; DiCarlo et al., Nucleic Acids Res. 2013 April; 41(7):4336-43; Dickinson et. al., Nat Methods. 2013 October; 10(10):1028-34; Ebina et. al., Sci Rep. 2013; 3:2510; Fujii et. al, Nucleic Acids Res. 2013 Nov. 1; 41(20):e187; Hu et. al., Cell Res. 2013 November; 23(11): 1322-5; Jiang et. al., Nucleic Acids Res. 2013 Nov. 1; 41(20):e188; Larson et. al., Nat Protoc. 2013 November; 8(11):2180-96; Mali et. al., Nat Methods. 2013 October; 10(10):957-63; Nakayama et. al., Genesis. 2013 December; 51(12):835-43; Ran et. al., Nat Protoc. 2013 November; 8(11):2281-308; Ran et. al., Cell. 2013 Sep. 12; 154(6):1380-9; Upadhyay et. al., G3 (Bethesda). 2013 Dec. 9; 3(12):2233-8; Walsh et. al., Proc Natl Acad Sci USA. 2013 Sep. 24; 110(39):15514-5; Xie et. al., Mol Plant. 2013 Oct. 9; Yang et. al., Cell. 2013 Sep. 12; 154(6):1370-9; Briner et al., Mol Cell. 2014 Oct. 23; 56(2):333-9; and U.S. patents and patent applications: U.S. Pat. Nos. 8,906,616; 8,895,308; 8,889,418; 8,889,356; 8,871,445; 8,865,406; 8,795,965; 8,771,945; 8,697,359; 20140068797; 20140170753; 20140179006; 20140179770; 20140186843; 20140186919; 20140186958; 20140189896; 20140227787; 20140234972; 20140242664; 20140242699; 20140242700; 20140242702; 20140248702; 20140256046; 20140273037; 20140273226; 20140273230; 20140273231; 20140273232; 20140273233; 20140273234; 20140273235; 20140287938; 20140295556; 20140295557; 20140298547; 20140304853; 20140309487; 20140310828; 20140310830; 20140315985; 20140335063; 20140335620; 20140342456; 20140342457; 20140342458; 20140349400; 20140349405; 20140356867; 20140356956; 20140356958; 20140356959; 20140357523; 20140357530; 20140364333; and 20140377868; all of which are hereby incorporated by reference in their entirety.

[0228] Guide RNAs Corresponding to Type V and Type VI CRISPR/Cas Endonucleases (e.g., Cpf1 Guide RNA)

[0229] A guide RNA that binds to a type V or type VI CRISPR/Cas protein (e.g., Cpf1, C2c1, C2c2, C2c3), and targets the complex to a specific location within a target nucleic acid is referred to herein generally as a “type V or type VI CRISPR/Cas guide RNA” An example of a more specific term is a “Cpf1 guide RNA.”

[0230] A type V or type VI CRISPR/Cas guide RNA (e.g., cpf1 guide RNA) can have a total length of from 30 nucleotides (nt) to 200 nt, e.g., from 30 nt to 180 nt, from 30 nt to 160 nt, from 30 nt to 150 nt, from 30 nt to 125 nt, from 30 nt to 100 nt, from 30 nt to 90 nt, from 30 nt to 80 nt, from 30 nt to 70 nt, from 30 nt to 60 nt, from 30 nt to 50 nt, from 50 nt to 200 nt, from 50 nt to 180 nt, from 50 nt to 160 nt, from 50 nt to 150 nt, from 50 nt to 125 nt, from 50 nt to 100 nt, from 50 nt to 90 nt, from 50 nt to 80 nt, from 50 nt to 70 nt, from 50 nt to 60 nt, from 70 nt to 200 nt, from 70 nt to 180 nt, from 70 nt to 160 nt, from 70 nt to 150 nt, from 70 nt to 125 nt, from 70 nt to 100 nt, from 70 nt to 90 nt, or from 70 nt to 80 nt). In some cases, a type V or type VI CRISPR/Cas guide RNA (e.g., cpf1 guide RNA) has a total length of at least 30 nt (e.g., at least 40 nt, at least 50 nt, at least 60 nt, at least 70 nt, at least 80 nt, at least 90 nt, at least 100 nt, or at least 120 nt).

[0231] In some cases, a Cpf1 guide RNA has a total length of 35 nt, 36 nt, 37 nt, 38 nt, 39 nt, 40 nt, 41 nt, 42 nt, 43 nt, 44 nt, 45 nt, 46 nt, 47 nt, 48 nt, 49 nt, or 50 nt.

[0232] Like a Cas9 guide RNA, a type V or type VI CRISPR/Cas guide RNA (e.g., cpf1 guide RNA) can include a target nucleic acid-binding segment and a duplex-forming region (e.g., in some cases formed from two duplex-forming segments, i.e., two stretches of nucleotides that hybridize to one another to form a duplex)

[0233] The target nucleic acid-binding segment of a type V or type VI CRISPR/Cas guide RNA (e.g., cpf1 guide RNA) can have a length of from 15 nt to 30 nt, e.g., 15 nt, 16 nt, 17 nt, 18 nt, 19 nt, 20 nt, 21 nt, 22 nt, 23 nt, 24 nt, 25 nt, 26 nt, 27 nt, 28 nt, 29 nt, or 30 nt. In some cases, the target nucleic acid-binding segment has a length of 23 nt. In some cases, the target nucleic acid-binding segment has a length of 24 nt. In some cases, the target nucleic acid-binding segment has a length of 25 nt.

[0234] The guide sequence of a type V or type VI CRISPR/Cas guide RNA (e.g., cpf1 guide RNA) can have a length of from 15 nt to 30 nt (e.g., 15 to 25 nt, 15 to 24 nt, 15 to 23 nt, 15 to 22 nt, 15 to 21 nt, 15 to 20 nt, 15 to 19 nt, 15 to 18 nt, 17 to 30 nt, 17 to 25 nt, 17 to 24 nt, 17 to 23 nt, 17 to 22 nt, 17 to 21 nt, 17 to 20 nt, 17 to 19 nt, 17 to 18 nt, 18 to 30 nt, 18 to 25 nt, 18 to 24 nt, 18 to 23 nt, 18 to 22 nt, 18 to 21 nt, 18 to 20 nt, 18 to 19 nt, 19 to 30 nt, 19 to 25 nt, 19 to 24 nt, 19 to 23 nt, 19 to 22 nt, 19 to 21 nt, 19 to 20 nt, 20 to 30 nt, 20 to 25 nt, 20 to 24 nt, 20 to 23 nt, 20 to 22 nt, 20 to 21 nt, 15 nt, 16 nt, 17 nt, 18 nt, 19 nt, 20 nt, 21 nt, 22 nt, 23 nt, 24 nt, 25 nt, 26 nt, 27 nt, 28 nt, 29 nt, or 30 nt). In some cases, the guide sequence has a length of 17 nt. In some cases, the guide sequence has a length of 18 nt. In some cases, the guide sequence has a length of 19 nt. In some cases, the guide sequence has a length of 20 nt. In some cases, the guide sequence has a length of 21 nt. In some cases, the guide sequence has a length of 22 nt. In some cases, the guide sequence has a length of 23 nt. In some cases, the guide sequence has a length of 24 nt.

[0235] The guide sequence of a type V or type VI CRISPR/Cas guide RNA (e.g., cpf1 guide RNA) can have 100% complementarity with a corresponding length of target nucleic acid sequence. The guide sequence can have less than 100% complementarity with a corresponding length of target nucleic acid sequence. For example, the guide sequence of a type V or type VI CRISPR/Cas guide RNA (e.g., cpf1 guide RNA) can have 1, 2, 3, 4, or 5 nucleotides that are not complementary to the target nucleic acid sequence. For example, in some cases, where a guide sequence has a length of 25 nucleotides, and the target nucleic acid sequence has a length of 25 nucleotides, in some cases, the target nucleic acid-binding segment has 100% complementarity to the target nucleic acid sequence. As another example, in some cases, where a guide sequence has a length of 25 nucleotides, and the target nucleic acid sequence has a length of 25 nucleotides, in some cases, the target nucleic acid-binding segment has 1 non-complementary nucleotide and 24 complementary nucleotides with the target nucleic acid sequence. As another example, in some cases, where a guide sequence has a length of 25 nucleotides, and the target nucleic acid sequence has a length of 25 nucleotides, in some cases, the target nucleic acid-binding segment has 2 non-complementary nucleotides and 23 complementary nucleotides with the target nucleic acid sequence.

[0236] The duplex-forming segment of a type V or type VI CRISPR/Cas guide RNA (e.g., cpf1 guide RNA) (e.g., of a targeter RNA or an activator RNA) can have a length of from 15 nt to 25 nt (e.g., 15 nt, 16 nt, 17 nt, 18 nt, 19 nt, 20 nt, 21 nt, 22 nt, 23 nt, 24 nt, or 25 nt).

[0237] The RNA duplex of a type V or type VI CRISPR/Cas guide RNA (e.g., cpf1 guide RNA) can have a length of from 5 base pairs (bp) to 40 bp (e.g., from 5 to 35 bp, 5 to 30 bp, 5 to 25 bp, 5 to 20 bp, 5 to 15 bp, 5-12 bp, 5-10 bp, 5-8 bp, 6 to 40 bp, 6 to 35 bp, 6 to 30 bp, 6 to 25 bp, 6 to 20 bp, 6 to 15 bp, 6 to 12 bp, 6 to 10 bp, 6 to 8 bp, 7 to 40 bp, 7 to 35 bp, 7 to 30 bp, 7 to 25 bp, 7 to 20 bp, 7 to 15 bp, 7 to 12 bp, 7 to 10 bp, 8 to 40 bp, 8 to 35 bp, 8 to 30 bp, 8 to 25 bp, 8 to 20 bp, 8 to 15 bp, 8 to 12 bp, 8 to 10 bp, 9 to 40 bp, 9 to 35 bp, 9 to 30 bp, 9 to 25 bp, 9 to 20 bp, 9 to 15 bp, 9 to 12 bp, 9 to 10 bp, 10 to 40 bp, 10 to 35 bp, 10 to 30 bp, 10 to 25 bp, 10 to 20 bp, 10 to 15 bp, or 10 to 12 bp).

[0238] As an example, a duplex-forming segment of a Cpf1 guide RNA can comprise a nucleotide sequence selected from (5′ to 3′): AAUUUCUACUGUUGUAGAU (SEQ ID NO: 1093), AAUUUCUGCUGUUGCAGAU (SEQ ID NO: 1094), AAUUUCCACUGUUGUGGAU (SEQ ID NO:1095), AAUUCCUACUGUUGUAGGU (SEQ ID NO:1096), AAUUUCUACUAUUGUAGAU (SEQ ID NO:1097), AAUUUCUACUGCUGUAGAU (SEQ ID NO: 1098), AAUUUCUACUUUGUAGAU (SEQ ID NO: 1099), and AAUUUCUACUUGUAGAU (SEQ ID NO:1100). The guide sequence can then follow (5′ to 3′) the duplex forming segment.

[0239] A non-limiting example of an activator RNA (e.g., tracrRNA) of a C2c1 guide RNA (dual guide or single guide) is an RNA that includes the nucleotide sequence GAAUUUUUCAAC GGGUGUGCCAAUGGCCACUUUCCAGGUGGCAAAGCCCGUUGAGCUUCUCAAAAAG (SEQ ID NO: 1101). In some cases, a C2c1 guide RNA (dual guide or single guide) is an RNA that includes the nucleotide sequence In some cases, a C2c1 guide RNA (dual guide or single guide) is an RNA that includes the nucleotide sequence GUCUAGAGGACAGAAUUUUUCAACGGGUGUGCCAAUGGCCACUUUCCAGGUGGCAAAGCCCGUUGAGCUUCUCAAAAAG (SEQ ID NO: 1102). In some cases, a C2c1 guide RNA (dual guide or single guide) is an RNA that includes the nucleotide sequence UCUAGAGGACAGAAUUUUUCAACGGGUGUGCCAAUGGCCACUUUCCAGGUGGCAAAGCCCGUUGAGCUUCUCAAAAAG (SEQ ID NO: 1103). A non-limiting example of an activator RNA (e.g., tracrRNA) of a C2c1 guide RNA (dual guide or single guide) is an RNA that includes the nucleotide sequence ACUUUCCAGGCAAAGCCCGUUGAGCUUCUCAAAAAG (SEQ ID NO: 1104). In some cases, a duplex forming segment of a C2c1 guide RNA (dual guide or single guide) of an activator RNA (e.g., tracrRNA) includes the nucleotide sequence AGCUUCUCA (SEQ ID NO: 1105) or the nucleotide sequence GCUUCUCA (SEQ ID NO: 1106) (the duplex forming segment from a naturally existing tracrRNA.

[0240] A non-limiting example of a targeter RNA (e.g., crRNA) of a C2c1 guide RNA (dual guide or single guide) is an RNA with the nucleotide sequence CUGAGAAGUGGCACNNNNNNNNNNNNNNNNNNNN (SEQ ID NO: 1107), where the Ns represent the guide sequence, which will vary depending on the target sequence, and although 20 Ns are depicted a range of different lengths are acceptable. In some cases, a duplex forming segment of a C2c 1 guide RNA (dual guide or single guide) of a targeter RNA (e.g., crRNA) includes the nucleotide sequence CUGAGAAGUGGCAC (SEQ ID NO: 1108) or includes the nucleotide sequence CUGAGAAGU (SEQ ID NO: 1109) or includes the nucleotide sequence UGAGAAGUGGCAC (SEQ ID NO: 1110) or includes the nucleotide sequence UGAGAAGU (SEQ ID NO: 1111).

[0241] Examples and guidance related to type V or type VI CRISPR/Cas endonucleases and guide RNAs (as well as information regarding requirements related to protospacer adjacent motif (PAM) sequences present in targeted nucleic acids) can be found in the art, for example, see Zetsche et al, Cell. 2015 Oct. 22; 163(3):759-71; Makarova et al, Nat Rev Microbiol. 2015 November; 13(11):722-36; and Shmakov et al., Mol Cell. 2015 Nov. 5; 60(3):385-97.

### Target Genomic DNA

[0242] A target nucleic acid (e.g., target genomic DNA) is located within a stem cell, where suitable stem cells are described above. A target genomic DNA can be any genomic DNA in which the sequence is to be modified, e.g., by substitution and/or insertion and/or deletion of one or more nucleotides present in the target genomic DNA.

[0243] Target genes (target genomic DNA) include those genes involved in various diseases or conditions. In some cases, the target genomic DNA is mutated, such that it encodes a non-functional polypeptide, or such that a polypeptide encoded by the target genomic DNA is not synthesized in any detectable amount, or such that a polypeptide encoded by the target genomic DNA is synthesized in a lower than normal amount, such that an individual having the mutation has a disease. Such diseases include, but are not limited to, achondroplasia, achromatopsia, acid maltase deficiency, adenosine deaminase deficiency, adrenoleukodystrophy, aicardi syndrome, alpha-1 antitrypsin deficiency, alpha-thalassemia, androgen insensitivity syndrome, apert syndrome, arrhythmogenic right ventricular, dysplasia, ataxia telangictasia, barth syndrome, beta-thalassemia, blue rubber bleb nevus syndrome, canavan disease, chronic granulomatous diseases (CGD), cri du chat syndrome, Crigler-Najjer Syndrome, cystic fibrosis, dercum's disease, ectodermal dysplasia, fanconi anemia, fibrodysplasia ossificans progressive, fragile X syndrome, galactosemis, Gaucher's disease, generalized gangliosidoses (e.g., GM1), Glycogen Storage Disease Type IV, hemochromatosis, the hemoglobin C mutation in the 6th codon of beta-globin (HbC), hemophilia, Huntington's disease, Hurler Syndrome, hypophosphatasia, Klinefelter syndrome, Krabbes Disease, Langer-Giedion Syndrome, leukocyte adhesion deficiency (LAD, OMIM No. 116920), leukodystrophy, long QT syndrome, Marfan syndrome, Moebius syndrome, mucopolysaccharidosis (MPS), nail patella syndrome, nephrogenic diabetes insipdius, neurofibromatosis, Neimann-Pick disease, osteogenesis imperfecta, porphyria, Prader-Willi syndrome, progeria, Proteus syndrome, retinoblastoma, Rett syndrome, Rubinstein-Taybi syndrome, Sanfilippo syndrome, severe combined immunodeficiency (SCID), Shwachman syndrome, sickle cell disease (sickle cell anemia), Smith-Magenis syndrome, Stickler syndrome, Tay-Sachs disease, Thrombocytopenia Absent Radius (TAR) syndrome, Treacher Collins syndrome, trisomy, tuberous sclerosis, Turner's syndrome, urea cycle disorder, von Hippel-Landau disease, Waardenburg syndrome, Williams syndrome, Wilson's disease, Wiskott-Aldrich syndrome, and X-linked lymphoproliferative syndrome. Other such diseases include, e.g., acquired immunodeficiencies, lysosomal storage diseases (e.g., Gaucher's disease, GM1, Fabry disease and Tay-Sachs disease), mucopolysaccahidosis (e.g., Hunter's disease, Hurler's disease), hemoglobinopathies (e.g., sickle cell diseases, HbC, α-thalassemia, β-thalassemia) and hemophilias.

[0244] For example, in some cases, the target genomic DNA comprises a mutation that gives rise to a trinucleotide repeat disease. Exemplary trinucleotide repeat diseases and target genes involved in trinucleotide repeat diseases Trinucleotide Repeat Diseases Gene DRPLA (Dentatorubropallidoluysian atrophy) ATN1 or DRPLA HD (Huntington's disease) HTT (Huntingtin) SBMA (Spinobulbar muscular atrophy or Androgen receptor on the Kennedy disease) X chromosome. SCA1 (Spinocerebellar ataxia Type 1) ATXN1 SCA2 (Spinocerebellar ataxia Type 2) ATXN2 SCA3 (Spinocerebellar ataxia Type 3 or ATXN3 Machado-Joseph disease) SCA6 (Spinocerebellar ataxia Type 6) CACNA1A SCA7 (Spinocerebellar ataxia Type 7) ATXN7 SCA17 (Spinocerebellar ataxia Type 17) TBP FRAXA (Fragile X syndrome) FMR1, on the X-chromosome FXTAS (Fragile X-associated tremor/FMR1, on the X-ataxia syndrome) chromosome FRAXE (Fragile XE mental retardation) AFF2 or FMR2, on the X-chromosome FRDA (Friedreich's ataxia) FXN or X25, (frataxin-reduced expression) DM (Myotonic dystrophy) DMPK SCA8 (Spinocerebellar ataxia Type 8) OSCA or SCA8 SCA12 (Spinocerebellar ataxia Type 12) PPP2R2B or SCA12.

[0245] For example, in some cases, a suitable target genomic DNA is a 3-globin gene, e.g., a 3-globin gene with a sickle cell mutation. As another example, a suitable target genomic DNA is a Huntington's locus, e.g., an HTT gene, where the HTT gene comprises a mutation (e.g., a CAG repeat expansion comprising more than 35 CAG repeats) that gives rise to Huntington's disease. As another example, a suitable target genomic DNA is an adenosine deaminase gene that comprises a mutation that gives rise to severe combined immunodeficiency. As another example, a suitable target genomic DNA is a BCL11A gene comprising a mutation associated with control of the gamma-globin genes. As another example, a suitable target genomic DNA is a BCL11a enhancer.

### Donor Polynucleotide

[0246] In some cases, a genome targeting composition comprises a donor template nucleic acid (“donor polynucleotide”). In some cases, a method of the present disclosure comprises contacting the target DNA with a donor polynucleotide, wherein the donor polynucleotide, a portion of the donor polynucleotide, a copy of the donor polynucleotide, or a portion of a copy of the donor polynucleotide integrates into the target DNA (e.g., via homology-directed repair). In some cases, the method does not comprise contacting the cell with a donor polynucleotide (e.g., resulting in non-homologous end-joining). A donor poly nucleotide can be introduced into a target cell using any convenient technique for introducing nucleic acids into cells.

[0247] When it is desirable to insert a polynucleotide sequence into a target DNA sequence, a polynucleotide comprising a donor sequence to be inserted is provided to the cell (e.g., the target DNA is contacted with a donor polynucleotide in addition to a genome targeting composition (e.g., a genome editing endonuclease; or a genome-editing endonuclease and a guide RNA). By a “donor sequence” or “donor polynucleotide” it is meant a nucleic acid sequence to be inserted at the cleavage site induced by a genome-editing endonuclease. A suitable donor polynucleotide can be single stranded or double stranded. For example, in some cases, a donor polynucleotide is single stranded (e.g., in some cases can be referred to as an oligonucleotide), and in some cases a donor polynucleotide is double stranded (e.g., in some cases can be include two separate oligonucleotides that are hybridized). The donor polynucleotide will contain sufficient homology to a genomic sequence at the cleavage site, e.g., 70%, 80%, 85%, 90%, 95%, or 100% homology with the nucleotide sequences flanking the cleavage site, e.g., within 100 bases or less (e.g., 50 bases or less of the cleavage site, e.g., within 30 bases, within 15 bases, within 10 bases, within 5 bases, or immediately flanking the cleavage site), to support homology-directed repair between it and the genomic sequence to which it bears homology. Approximately 25 nucleotides (nt) or more (e.g., 30 nt or more, 40 nt or more, 50 nt or more, 60 nt or more, 70 nt or more, 80 nt or more, 90 nt or more, 100 nt or more, 150 nt or more, 200 nt or more, etc.) of sequence homology between a donor and a genomic sequence (or any integral value between 10 and 200 nucleotides, or more) can support homology-directed repair. For example, in some cases, the 5′ and/or the 3′ flanking homology arm (e.g., in some cases both of the flanking homology arms) of a donor polynucleotide can be 30 nucleotides (nt) or more in length (e.g., 40 nt or more, 50 nt or more, 60 nt or more, 70 nt or more, 80 nt or more, 90 nt or more, 100 nt or more, etc.). For example, in some cases, the 5′ and/or the 3′ flanking homology arm (e.g., in some cases both of the flanking homology arms) of a donor polynucleotide can have a length in a range of from 30 nt to 500 nt (e.g., 30 nt to 400 nt, 30 nt to 350 nt, 30 nt to 300 nt, 30 nt to 250 nt, 30 nt to 200 nt, 30 nt to 150 nt, 30 nt to 100 nt, 30 nt to 90 nt, 30 nt to 80 nt, 50 nt to 400 nt, 50 nt to 350 nt, 50 nt to 300 nt, 50 nt to 250 nt, 50 nt to 200 nt, 50 nt to 150 nt, 50 nt to 100 nt, 50 nt to 90 nt, 50 nt to 80 nt, 60 nt to 400 nt, 60 nt to 350 nt, 60 nt to 300 nt, 60 nt to 250 nt, 60 nt to 200 nt, 60 nt to 150 nt, 60 nt to 100 nt, 60 nt to 90 nt, 60 nt to 80 nt).

[0248] Donor sequences can be of any length, e.g., 10 nucleotides or more, 50 nucleotides or more, 100 nucleotides or more, 250 nucleotides or more, 500 nucleotides or more, 1000 nucleotides or more, 5000 nucleotides or more, etc.

[0249] The donor sequence is typically not identical to the genomic sequence that it replaces. Rather, the donor sequence may contain at least one or more single base changes, insertions, deletions, inversions or rearrangements with respect to the genomic sequence, so long as sufficient homology is present to support homology-directed repair. In some embodiments, the donor sequence comprises a non-homologous sequence flanked by two regions of homology, such that homology-directed repair between the target DNA region and the two flanking sequences results in insertion of the non-homologous sequence at the target region. Donor sequences may also comprise a vector backbone containing sequences that are not homologous to the DNA region of interest and that are not intended for insertion into the DNA region of interest. Generally, the homologous region(s) of a donor sequence will have at least 50% sequence identity to a genomic sequence with which recombination is desired. In certain embodiments, 60%, 70%, 80%, 90%, 95%, 98%, 99%, or 99.9% sequence identity is present. Any value between 1% and 100% sequence identity can be present, depending upon the length of the donor polynucleotide.”

[0250] In some cases, a donor polynucleotide is delivered to the cell (introduced into a cell) as part of viral vector (e.g., an adeno-associated virus (AAV) vector; a lentiviral vector; etc.). For example a viral DNA (e.g., AAV DNA) can include a donor polynucleotide sequence (donor sequence) (e.g., a virus, e.g., AAV, can include a DNA molecule that includes a donor polynucleotide sequence). In some cases, a donor polynucleotide is introduced into a cell as a virus (e.g., an AAV, e.g., the donor polynucleotide sequence is present as part of the viral DNA, e.g., AAV DNA) and the genome-editing endonuclease (e.g., ZFN; Cas9 protein; etc.) and, where applicable, a guide RNA are delivered by a different route. For example, in some cases, a donor polynucleotide is introduced into a cell as a virus (e.g., an AAV, e.g., the donor polynucleotide sequence is present as part of the viral DNA, e.g., AAV DNA) and a Cas9 protein and Cas9 guide RNA are delivered as part of a separate expression vector. In some cases, a donor polynucleotide is introduced into a cell as a virus (e.g., an AAV, e.g., the donor polynucleotide sequence is present as part of the viral DNA, e.g., AAV DNA) and a Cas9 protein and Cas9 guide RNA are delivered as part of a ribonucleoprotein complex (RNP). In some cases: (i) a donor polynucleotide is introduced into a cell as a virus (e.g., an AAV, e.g., the donor polynucleotide sequence is present as part of the viral DNA, e.g., AAV DNA), (ii) a Cas9 guide RNA is delivered as either an RNA or DNA encoding the RNA, and (iii) a Cas9 protein is delivered as a protein or as a nucleic acid encoding the protein (e.g., RNA or DNA).

[0251] In some cases, a recombinant viral vector (e.g., a recombinant AAV vector) comprising a donor polynucleotide is introduced into a cell before a Cas9-guide RNA RNP is introduced into the cell. For example, in some cases, a recombinant viral vector (e.g., a recombinant AAV vector) comprising a donor polynucleotide is introduced into a cell from 2 hours to 72 hours (e.g., from 2 hours to 4 hours, from 4 hours to 8 hours, from 8 hours to 12 hours, from 12 hours to 24 hours, from 24 hours to 48 hours, or from 48 hours to 72 hours) before the Cas9-guide RNA RNP is introduced into the cell.

### EXAMPLES

[0252] The following examples are put forth so as to provide those of ordinary skill in the art with a complete disclosure and description of how to make and use the present invention, and are not intended to limit the scope of what the inventors regard as their invention nor are they intended to represent that the experiments below are all or the only experiments performed. Efforts have been made to ensure accuracy with respect to numbers used (e.g., amounts, temperature, etc.) but some experimental errors and deviations should be accounted for. Unless indicated otherwise, parts are parts by weight, molecular weight is weight average molecular weight, temperature is in degrees Celsius, and pressure is at or near atmospheric. Standard abbreviations may be used, e.g., bp, base pair(s); kb, kilobase(s); pl, picoliter(s); s or sec, second(s); min, minute(s); h or hr, hour(s); aa, amino acid(s); kb, kilobase(s); bp, base pair(s); nt, nucleotide(s); i.m., intramuscular(ly); i.p., intraperitoneal(ly); s.c., subcutaneous(ly); and the like.

### Example 1

[0253] Site-specific gene correction of the point mutation that underlies sickle cell disease (SCD) constitutes a precise strategy to generate a life-long source of gene-corrected erythrocytes. Previous work has shown that efficient gene correction can be achieved in CD34⁺ stem and progenitor cells; nevertheless, levels of HDR-mediated gene modification in long-term reconstituting hematopoietic stem cells (HSCs) remain low. The main objective of this study was to identify and characterize the mechanisms which underlie decreased HDR efficacy in primitive HSCs, by comprehensive evaluation of the cellular and molecular mechanisms that govern site-specific gene modification in mature vs. primitive human hematopoietic stem and progenitor cell populations. Zinc finger nucleases (ZFNs) designed to target the sickle mutation in the human β-globin gene that causes SCD were used. The ZFNs create double-strand breaks that induce cellular DNA damage repair pathways which results in DNA repair either through non-homologous-end-joining (NHEJ) or homology-directed repair (HDR) when co-delivered with a donor template. In immunophenotypically defined human cell populations: HSCs (CD34⁺/CD38⁻/CD90⁺CD45RA⁻); multipotent progenitors (MPPs) (CD34⁺/CD38⁻/CD45RA⁻/CD90⁻); and progenitor cells (CD34⁺/CD38⁺), efficiency of delivery and time-course of expression mRNA encoding GFP or ZFN, efficacy of two homologous donors, cell cycle status, gene expression of key HDR genes and cytotoxic responses to the treatment, were assessed. In concordance with previous findings, lower levels of HDR-mediated gene modification were observed in HSCs and MPPs compared to progenitor cells. ZFN mRNA delivery and expression did not differ between HSC populations. HDR pathway genes were not differentially expressed in HSCs and progenitors at the time of electroporation (48 hrs post-stimulation). However, analysis of cytotoxic effects, as measured by flow cytometry and gene expression analysis of apoptotic pathways, revealed a higher sensitivity of HSCs to the electroporated ZFNs and oligonucleotide donor, resulting in ˜80% cell death compared to ˜30% observed in progenitors. Over-expression of the apoptosis regulator Bcl-2 ameliorated the treatment-associated cytotoxicity in HSCs and resulted in a two- to three-fold more HSC post-treatment. The data indicate an elevated sensitivity to toxicity from the ZFN mRNA and oligonucleotide donor for HSCs compared to the more mature progenitor cells. Transient expression of Bcl-2 appears to preserve HSC survival after HDR-based gene editing, which increases the frequency of gene-corrected HSCs. These findings have implications for clinical development of HSC targeted gene therapy using genetically modified stem cells.

### Material & Methods

[0254] Cells, Culture and Fluorescence Activated Cell Sortin2 (FACS)

[0255] Adult human mobilized peripheral blood apheresis was purchased from the Division of Experimental Hematology and Cancer Biology, Cincinatti Children's Hospital Medical Center. CD34⁺ cells were isolated using the magnetic activated cell sorting (MACS) CD34⁺ enrichment kit (Miltenyi Biotec) and the CliniMACS system (Miltenyi Biotec), resulting in a purity of 96-98%. The cells were cultured for 2 days prior to electroporation in media containing X-vivo 15 (Lonza) supplemented with Penicillin/Streptomycin/L-glutamine and the cytokines recombinant human stem cell factor (SCF) (50 ng/l), recombinant human thrombopoietin (rhTPO) (50 ng/l) and recombinant human Flt3-ligand (rhFlt3-Ligand) (50 ng/l) (Peprotech). For FACS analysis, cells were immunostained with CD34-Pacific blue (or APC-Cy7), CD38-PeCy7, CD45RA-PerCP-Cy5.5 (or FITC), CD90-PE, DAPI (or 7AAD), Annexin V-FITC and Ki67-APC (Biolegend).

[0256] Zinc Finger Nucleases

[0257] Developed by Sangamo Biosciences to target the region over the sickle mutation in exon 1 of beta-globin. A 101-bp single-stranded oligodeoxynucleotide was used as a homologous donor template, containing the corrective base (Eurofins MWG Operon).

[0258] In Vitro Transcription of Messenger RNA

[0259] Plasmids of ZFN and Bcl-2 were linearized with SpeI to serve as DNA templates and mRNA was synthesized using the mMessage mMachine T7 Ultra Kit (Ambion) and purified with RNeasy MinElute Cleanup Kit (Qiagen).

[0260] Electroporation and Gene Modification

[0261] Electroporation of CD34⁺ cells was performed using the ECM 830 Electroporation System (Harvard Apparatus). 1×10⁶ cells were centrifuged and resuspended in 100 d of BTX solution together with the ZFN mRNA, donor and with or without (w/wo) BCL-2 mRNA. Genomic DNA was isolated using the PureLink Genomic DNA mini kit (Life Technologies). The beta globin locus was PCR-amplified with 3 sets of primers for targeted re-sequencing library preparation. The first set of primers (HBB F: 5′-atgcttagaaccgaggtagagttt-3′ (SEQ ID NO: 1140) and HBB R: 5′-cctgagacttccacactgatg-3′ (SEQ ID NO: 1141)) were designed to amplify beta globin outside of the donor region. The next set of primers were designed to have homology to the beta globin region, as well as P5 and P7 adapters for high throughput illumina sequencing, read 1 and read 2 sequence used for analysis, and a unique index to identify each sample. Illumina libraries were sequenced on an Illumina HiSeq 2500.

[0262] Apoptosis Gene Expression

[0263] Cells were isolated for cellular RNA (RNeasy mini kit, Qiagen), converted to cDNA using PreAMP cDNA Synthesis Kit and primer mix (Qiagen) and analyzed for gene expression using RT² Profiler™ PCR Array Human Apoptosis 384HT (Qiagen, PAHS-3012ZE-2).

[0264] NSG Mice

[0265] NOD/SCID IL2R gamma^{-/-} (NSG) mice obtained from the Jackson Laboratory (Bar Harbor, Me., USA) were maintained by the UCLA Department of Laboratory Animal Medicine (DLAM) under protocols reviewed and approved by the UCLA Chancellor's Animal Research Committee (ARC#2008-167). 1×10⁶ CD34⁺ cells were electroporated with ZFNs mRNA (5 μg), Oligo (3 μM), and with or without Bcl-2 mRNA (5 μg).

### Results

[0266] The data are depicted in FIGS. 7-13. FIG. 7 provides a schematic depiction of the experimental design, and immunophenotype-defined populations.

[0267] FIG. 8 provides a HDR vs. NHEJ comparison in various cell populations. Peripheral blood (PB) CD34⁺ cells were pre-stimulated for two days and electroporated with ZFN mRNA and 3 M of an oligodeoxynucleotide homologous donor template. HDR and NHEJ analysis was determined by high throughput sequencing of the β-globin locus, n=6.

[0268] FIG. 9 depicts cell death and apoptosis analysis of the different cell populations post-electroporation. To determine the cytotoxic effects of electroporation, ZFN mRNA and oligo donor in the three immunophenotypically identified populations, FACS analysis was performed to identify cells labeled with 7-AAD and AnnexinV, 20 hrs post-electroporation, n=5.

[0269] FIGS. 10A-10C depict the effect of transient overexpression of BCL-2 mRNA on cell toxicity as measured by flow cytometry and on the number of cells overall. As shown in FIG. 10A-10C, transient overexpression of BCL-2 mRNA decreases cell toxicity as measured by flow cytometry and increases the number of cells overall. The induced cytotoxicity was analyzed for hematopoietic stem cells (HSCs), multi-potent progenitors (MPPs) and progenitor cells 20 hrs following electroporation of ZFN mRNA and oligonucleotide donor, with or without including BCL-2 mRNA. (a) Flow cytometry, identifying cells labeled with 7-aminoactinomycin D (7-AAD) and AnnexinV, n=4. (b) Cell count measured by FACS 20 hrs post-electroporation, n=4. Starting cell conc.: 4E6 CD34⁺ cells (c) Cord blood CD34⁺ cells were tirated with 1, 2, 5 and 10 g of BCL-2 mRNA and the cell toxicity was analyzed 20 hrs post-electroporation by flow cytometry identifying cells labeled with 7-AAD and AnnexinV, n=3.

[0270] FIG. 11 depicts the effect of transient overexpression of BCL-2 mRNA on gene modification levels in HSC, MPP, and progenitor cells treated with ZFN mRNA and an oligonucleotide donor. The data in FIG. 11 show that transient overexpression of BCL-2 mRNA leads to higher gene modification levels in HSC, MPP and progenitor cells treated with ZFN mRNA and oligonucleotide donor. Site-specific HDR-mediated gene modification by quantitative reverse transcription-polymerase chain reaction (qRT-PCR) analysis of the HhaI restriction fragment length polymorphism (RFLP) (n=2) in the different cell populations, treated with or without BCL-2 mRNA, n=2.

[0271] FIGS. 12A-12B depict apoptosis pathway gene expression analysis by quantitative polymerase chain reaction (qPCR) in human HSCs, MPPs and progenitor cells. To determine whether apoptosis pathway gene expression differences exist between the respective cell populations, 384 key genes involved in several apoptotic pathways were analyzed. CD34⁺ cells were pre-stimulated for two days, electroporated with ZFN mRNA (5 μg) and oligonucleotide (oligo) donor (3 μM) and thereafter sorted into HSCs, MPPs and progenitors cells by FACS, 6 hrs post-electroporation, n=3. (a) Cell toxicity analyzed by FACS to identify cells labeled with 7-AAD, 6 hrs post-electroporation. (b) HSCs, MPPs and progenitor cells were isolated to cellular RNA (6 hrs post-electroporation), converted to cDNA and thereafter analyzed on the qRT-PCR, n=3. This initial study indicates a deficiency of the BCL-2 gene in HSCs and MPPs compared to progenitor cells, observed at this time point.

[0272] FIGS. 13A-D depict xenograft transplantations of female immune-deficient NSG mice. Two experimental arms with 10 million CD34⁺ cells respectively were pre-stimulated for two days and electroporated with ZFN mRNA (5 μg) and oligo donor (3 μM), w/wo BCL-2 mRNA (5 μg). The following day, the cell count of the two treatment groups was measured by trypan blue (a) and cell death in the respective groups was measured (b). Gene modification was determined by qPCR, after 3 days of in vitro culture (c). Next, gene-modified CD34⁺ cells from each respective group were transplanted in vivo intravenously into NSG mice, where four mice received the remaining cells; Z+O group (1E6 viable gene modified cells/mouse) and the Z+O+BCL-2 group (2.25E6 viable gene modified cells/mouse). Two months after transplantation, the engraftment (% hCD45) and lineage analysis of human cells in peripheral blood was analyzed (d).

[0273] While the present invention has been described with reference to the specific embodiments thereof, it should be understood by those skilled in the art that various changes may be made and equivalents may be substituted without departing from the true spirit and scope of the invention. In addition, many modifications may be made to adapt a particular situation, material, composition of matter, process, process step or steps, to the objective, spirit and scope of the present invention. All such modifications are intended to be within the scope of the claims appended hereto.

The application's sequence listing, which the Patent Office published only in electronic form, follows.

SEQUENCE LISTING (1148 sequences)

SEQ ID NO: 1 - protein, 15 aa, artificial sequence
  Synthetic sequence
IGLDIGTNSVGWAVI

SEQ ID NO: 2 - protein, 8 aa, artificial sequence
  Synthetic sequence
IVIEMARE

SEQ ID NO: 3 - protein, 27 aa, artificial sequence
  Synthetic sequence
DVDHIVPQSFLKDDSIDNKVLTRSDKN

SEQ ID NO: 4 - protein, 8 aa, artificial sequence
  Synthetic sequence
HHAHDAYL

SEQ ID NO: 5 - protein, 1368 aa, Streptococcus pyogenes [sequence omitted]

SEQ ID NO: 6 - protein, 1367 aa, Streptococcus pyogenes
MDKKYSIGLDIGTNSVGWAVITDDYKVPSKKLKVLGNTDRHGIKKNLIGALLFDSGETAEATRLKRTARRRYTRRKNRICYLQEIFSNEMAKVDDSFFHRLEESFLVEEDKKHERHPIFGNIVDEVAYHEKYPTIYHLRKKLADSTDKVDLRLIYLALAHMIKFRGHFLIEGDLNPDNSDVDKLFIQLVQTYNQLFEENPINASRVDAKAILSARLSKSRRLENLIAQLPGEKKNGLFGNLIALSLGLTPNFKSNFDLAEDAKLQLSKDTYDDDLDNLLAQIGDQYADLFLAAKNLSDAILLSDILRVNSEITKAPLSASMIKRYDEHHQDLTLLKALVRQQLPEKYKEIFFDQSKNGYAGYIDGGASQEEFYKFIKPILEKMDGTEELLAKLNREDLLRKQRTFDNGSIPYQIHLGELHAILRRQEDFYPFLKDNREKIEKILTFRIPYYVGPLARGNSRFAWMTRKSEETITPWNFEEVVDKGASAQSFIERMTNFDKNLPNEKVLPKHSLLYEYFTVYNELTKVKYVTEGMRKPAFLSGEQKKAIVDLLFKTNRKVTVKQLKEDYFKKIECFDSVEISGVEDRFNTSLGTYHDLLKIIKDKDFLDNEENEDILEDIVLTLTLFEDKEMIEERLKKYANLFDDKVMKQLKRRHYTGWGRLSRKLINGIRDKQSGKTILDFLKSDGFANRNFMQLINDDSLTFKEAIQKAQVSGQGHSLHEQIANLAGSPAIKKGILQTVKIVDELVKVMGHKPENIVIEMARENQTTQKGQKNSRERMKRIEEGIKELGSQILKEHPVENTQLQNEKLYLYYLQNGRDMYVDQELDINRLSDYDVDHIVPQSFLKDDSIDNKVLTRSDKNRGKSDNVPSEEVVKKMKNYWRQLLNAKLITQRKFDNLTKAERGGLSELDKAGFIKRQLVETRQITKHVAQILDSRMNTKYDENDKLIREVKVITLKSKLVSDFRKDFQFYKVREINNYHHAHDAYLNAVVGTALIKKYPKLESEFVYGDYKVYDVRKMIAKSEQEIGKATAKYFFYSNIMNFFKTEITLANGEIRKRPLIETNGETGEIVWDKGRDFATVRKVLSMPQVNIVKKTEVQTGGFSKESILPKRNSDKLIARKKDWDPKKYGGFDSPTVAYSVLVVAKVEKGKSKKLKSVKELLGITIMERSSFEKNPIDFLEAKGYKEVRKDLIIKLPKYSLFELENGRKRMLASAGELQKGNELALPSKYVNFLYLASHYEKLKGSPEDNEQKQLFVEQHKHYLDEIIEQISEFSKRVILADANLDKVLSAYNKHRDKPIREQAKNIIHLFTLTNLGAPAAFKYFDTTIERNRYKSIKEVLDATLIHQSITGLYEIRIDLSQLGGD

SEQ ID NO: 7 - protein, 1056 aa, Pasteurella multocida
MQTTNLSYILGLDLGIASVGWAVVEINENEDPIGLIDVGVRIFERAEVPKTGESLALSRRLARSTRRLIRRRAHRLLLAKRFLKREGILSTIDLEKGLPNQAWELRVAGLERRLSAIEWGAVLLHLIKHRGYLSKRKNESQTNNKELGALLSGVAQNHQLLQSDDYRTPAELALKKFAKEEGHIRNQRGAYTHTFNRLDLLAELNLLFAQQHQFGNPHCKEHIQQYMTELLMWQKPALSGEAILKMLGKCTHEKNEFKAAKHTYSAERFVWLTKLNNLRILEDGAERALNEEERQLLINHPYEKSKLTYAQVRKLLGLSEQAIFKHLRYSKENAESATFMELKAWHAIRKALENQGLKDTWQDLAKKPDLLDEIGTAFSLYKTDEDIQQYLTNKVPNSVINALLVSLNFDKFIELSLKSLRKILPLMEQGKRYDQACREIYGHHYGEANQKTSQLLPAIPAQEIRNPVVLRTLSQARKVINAIIRQYGSPARVHIETGRELGKSFKERREIQKQQEDNRTKRESAVQKFKELFSDFSSEPKSKDILKFRLYEQQHGKCLYSGKEINIHRLNEKGYVEIDHALPFSRTWDDSFNNKVLVLASENQNKGNQTPYEWLQGKINSERWKNFVALVLGSQCSAAKKQRLLTQVIDDNKFIDRNLNDTRYIARFLSNYIQENLLLVGKNKKNVFTPNGQITALLRSRWGLIKARENNNRHHALDAIVVACATPSMQQKITRFIRFKEVHPYKIENRYEMVDQESGEIISPHFPEPWAYFRQEVNIRVFDNHPDTVLKEMLPDRPQANHQFVQPLFVSRAPTRKMSGQGHMETIKSAKRLAEGISVLRIPLTQLKPNLLENMVNKEREPALYAGLKARLAEFNQDPAKAFATPFYKQGGQQVKAIRVEQVQKSGVLVRENNGVADNASIVRTDVFIKNNKFFLVPIYTWQVAKGILPNKAIVAHKNEDEWEEMDEGAKFKFSLFPNDLVELKTKKEYFFGYYIGLDRATGNISLKEHDGEISKGKDGVYRVGVKLALSFEKYQVDELGKNRQICRPQQRQPVR

SEQ ID NO: 8 - protein, 1368 aa, Streptococcus pyogenes
MDKKYSIGLDIGTNSVGWAVITDDYKVPSKKLKGLGNTDRHGIKKNLIGALLFDSGETAEATRLKRTARRRYTRRKNRICYLQEIFSNEMAKVDDSFFHRLEESFLVEEDKKHERHPIFGNIVDEVAYHEKYPTIYHLRKKLADSTDKVDLRLIYLALAHMIKFRGHFLIEGDLNPDNSDVDKLFIQLVQTYNQLFEENPINASRVDAKAILSARLSKSRRLENLIAQLPGEKKNGLFGNLIALSLGLTPNFKSNFDLAEDAKLQLSKDTYDDDLDNLLAQIGDQYADLFLAAKNLSDATLLSDILRVNSEITKAPLSASMIKRYDEHHQDLTLLKALVRQQLPEKYKEIFFDQSKNGYAGYIDGGASQEEFYKFIKPILEKMDGTEELLAKLNREDLLRKQRTFDNGSIPYQIHLGELHAILRRQEDFYPFLKDNREKIEKILTFRIPYYVGPLARGNSRFAWMTRKSEETITPWNFEEVVDKGASAQSFIERMTNFDKNLPNEKVLPKHSLLYEYFTVYNELTKVKYVTEGMRKPAFLSGEQKKAIVDLLFKTNRKVTVKQLKEDYFKKIECFDSVEISGVEDRFNASLGTYHDLLKIIKDKDFLDNEENEDILEDIVLTLTLFEDREMIEERLKTYAHLFDDKVMKQLKRRRYTGWGRLSRKLINGIRDKQSGKTILDFLKSDGFANRNFMQLIHDDSLTFKEDIQKAQVSGQGDSLHEHIANLAGSPAIKKGILQTVKVVDELVKVMGRHKPENIVIEMARENQTTQKGQKNSRERMKRIEEGIKELGSDILKEYPVENTQLQNEKLYLYYLQNGRDMYVDQELDINRLSDYDVDHIVPQSFLKDDSIDNKVLTRSDKNRGKSDNVPSEEVVKKMKNYWRQLLNAKLITQRKFDNLTKAERGGLSELDKVGFIKRQLVETRQITKHVAQILDSRMNTKYDENDKLIREVRVITLKSKLVSDFRKDFQFYKVREINNYHHAHDAYLNAVVGTALIKKYPKLESEFVYGDYKVYDVRKMIAKSEQEIGKATAKYFFYSNIMNFFKTEITLANGEIRKRPLIETNGETGEIVWDKGRDFATVRKVLSMPQVNIVKKTEVQTGGFSKESILPKRNSDKLIARKKDWDPKKYGGFDSPTVAYSVLVVAKVEKGKSKKLKSVKELLGITIMERSSFEKDPIDFLEAKGYKEVRKDLIIKLPKYSLFELENGRKRMLASAGELQKGNELALPSKYVNFLYLASHYEKLKGSPEDNEQKQLFVEQHKHYLDEIIEQISEFSKRVILADANLDKVLSAYNKHRDKPIREQAENIIHLFTLTNLGAPAAFKYFDTTIDRKRYTSTKEVLDATLIHQSITGLYETRIDLSQLGGD

SEQ ID NO: 9 - protein, 1334 aa, Listeria innocua
MKKPYTIGLDIGTNSVGWAVLTDQYDLVKRKMKIAGDSEKKQIKKNFWGVRLFDEGQTAADRRMARTARRRIERRRNRISYLQGIFAEEMSKTDANFFCRLSDSFYVDNEKRNSRHPFFATIEEEVEYHKNYPTIYHLREELVNSSEKADLRLVYLALAHIIKYRGNFLIEGALDTQNTSVDGIYKQFIQTYNQVFASGIEDGSLKKLEDNKDVAKILVEKVTRKEKLERILKLYPGEKSAGMFAQFISLIVGSKGNFQKPFDLIEKSDIECAKDSYEEDLESLLALIGDEYAELFVAAKNAYSAVVLSSIITVAETETNAKLSASMIERFDTHEEDLGELKAFIKLHLPKHYEEIFSNTEKHGYAGYIDGKTKQADFYKYMKMTLENIEGADYFIAKIEKENFLRKQRTFDNGAIPHQLHLEELEAILHQQAKYYPFLKENYDKIKSLVTFRIPYFVGPLANGQSEFAWLTRKADGEIRPWNIEEKVDFGKSAVDFIEKMTNKDTYLPKENVLPKHSLCYQKYLVYNELTKVRYINDQGKTSYFSGQEKEQIFNDLFKQKRKVKKKDLELFLRNMSHVESPTIEGLEDSFNSSYSTYHDLLKVGIKQEILDNPVNTEMLENIVKILTVFEDKRMIKEQLQQFSDVLDGVVLKKLERRHYTGWGRLSAKLLMGIRDKQSHLTILDYLMNDDGLNRNLMQLINDSNLSFKSIIEKEQVTTADKDIQSIVADLAGSPAIKKGILQSLKIVDELVSVMGYPPQTIVVEMARENQTTGKGKNNSRPRYKSLEKAIKEFGSQILKEHPTDNQELRNNRLYLYYLQNGKDMYTGQDLDIHNLSNYDIDHIVPQSFITDNSIDNLVLTSSAGNREKGDDVPPLEIVRKRKVFWEKLYQGNLMSKRKFDYLTKAERGGLTEADKARFIHRQLVETRQITKNVANILHQRFNYEKDDHGNTMKQVRIVTLKSALVSQFRKQFQLYKVRDVNDYHHAHDAYLNGVVANTLLKVYPQLEPEFVYGDYHQFDWFKANKATAKKQFYTNIMLFFAQKDRIIDENGEILWDKKYLDTVKKVMSYRQMNIVKKTEIQKGEFSKATIKPKGNSSKLIPRKTNWDPMKYGGLDSPNMAYAVVIEYAKGKNKLVFEKKIIRVTIMERKAFEKDEKAFLEEQGYRQPKVLAKLPKYTLYECEEGRRRMLASANEAQKGNQQVLPNHLVTLLHHAANCEVSDGKSLDYIESNREMFAELLAHVSEFAKRYTLAEANLNKINQLFEQNKEGDIKAIAQSFVDLMAFNAMGAPASFKFFETTIERKRYNNLKELLNSTIIYQSITGLYESRKRLDD

SEQ ID NO: 10 - protein, 1368 aa, Streptococcus pyogenes; identical to SEQ ID NO: 8

SEQ ID NO: 11 - protein, 1370 aa, Streptococcus agalactiae
MNKPYSIGLDIGTNSVGWSIITDDYKVPAKKMRVLGNTDKEYIKKNLIGALLFDGGNTAADRRLKRTARRRYTRRRNRILYLQEIFAEEMSKVDDSFFHRLEDSFLVEEDKRGSKYPIFATLQEEKDYHEKFSTIYHLRKELADKKEKADLRLIYIALAHIIKFRGHFLIEDDSFDVRNTDISKQYQDFLEIFNTTFENNDLLSQNVDVEAILTDKISKSAKKDRILAQYPNQKSTGIFAEFLKLIVGNQADFKKYFNLEDKTPLQFAKDSYDEDLENLLGQIGDEFADLFSAAKKLYDSVLLSGILTVIDLSTKAPLSASMIQRYDEHREDLKQLKQFVKASLPEKYQEIFADSSKDGYAGYIEGKTNQEAFYKYLSKLLTKQEDSENFLEKIKNEDFLRKQRTFDNGSIPHQVHLTELKAIIRRQSEYYPFLKENQDRIEKILTFRIPYYIGPLAREKSDFAWMTRKTDDSIRPWNFEDLVDKEKSAEAFIHRMTNNDFYLPEEKVLPKHSLIYEKFTVYNELTKVRYKNEQGETYFFDSNIKQEIFDGVFKEHRKVSKKKLLDFLAKEYEEFRIVDVIGLDKENKAFNASLGTYHDLEKILDKDFLDNPDNESILEDIVQTLTLFEDREMIKKRLENYKDLFTESQLKKLYRRHYTGWGRLSAKLINGIRDKESQKTILDYLIDDGRSNRNFMQLINDDGLSFKSIISKAQAGSHSDNLKEVVGELAGSPAIKKGILQSLKIVDELVKVMGYEPEQIVVEMARENQTTNQGRRNSRQRYKLLDDGVKNLASDLNGNILKEYPTDNQALQNERLFLYYLQNGRDMYTGEALDIDNLSQYDIDHIIPQAFIKDDSIDNRVLVSSAKNRGKSDDVPSLEIVKDCKVFWKKLLDAKLMSQRKYDNLTKAERGGLTSDDKARFIQRQLVETRQITKHVARILDERFNNELDSKGRRIRKVKIVTLKSNLVSNFRKEFGFYKIREVNNYHHAHDAYLNAVVAKAILTKYPQLEPEFVYGDYPKYNSYKTRKSATEKLFFYSNIMNFFKTKVTLADGTVVVKDDIEVNNDTGEIVWDKKKHFATVRKVLSYPQNNIVKKTEIQTGGFSKESILAHGNSDKLIPRKTKDIYLDPKKYGGFDSPIVAYSVLVVADIKKGKAQKLKTVTELLGITIMERSRFEKNPSAFLESKGYLNIRADKLIILPKYSLFELENGRRRLLASAGELQKGNELALPTQFMKFLYLASRYNESKGKPEEIEKKQEFVNQHVSYFDDILQLINDFSKRVILADANLEKINKLYQDNKENISVDELANNIINLFTFTSLGAPAAFKFFDKIVDRKRYTSTKEVLNSTLIHQSITGLYETRIDLGKLGED

SEQ ID NO: 12 - protein, 1345 aa, Streptococcus mutans
MKKPYSIGLDIGTNSVGWAVVTDDYKVPAKKMKVLGNTDKSHIEKNLLGALLFDSGNTAEDRRLKRTARRRYTRRRNRILYLQEIFSEEMGKVDDSFFHRLEDSFLVTEDKRGERHPIFGNLEEEVKYHENFPTIYHLRQYLADNPEKVDLRLVYLALAHIIKFRGHFLIEGKFDTRNNDVQRLFQEFLAVYDNTFENSSLQEQNVQVEEILTDKISKSAKKDRVLKLFPNEKSNGRFAEFLKLIVGNQADFKKHFELEEKAPLQFSKDTYEEELEVLLAQIGDNYAELFLSAKKLYDSILLSGILTVTDVGTKAPLSASMIQRYNEHQMDLAQLKQFIRQKLSDKYNEVFSDVSKDGYAGYIDGKTNQEAFYKYLKGLLNKIEGSGYFLDKIEREDFLRKQRTFDNGSIPHQIHLQEMRAIIRRQAEFYPFLADNQDRIEKLLTFRIPYYVGPLARGKSDFAWLSRKSADKITPWNFDEIVDKESSAEAFINRMTNYDLYLPNQKVLPKHSLLYEKFTVYNELTKVKYKTEQGKTAFFDANMKQEIFDGVFKVYRKVTKDKLMDFLEKEFDEFRIVDLTGLDKENKVFNASYGTYHDLCKILDKDFLDNSKNEKILEDIVLTLTLFEDREMIRKRLENYSDLLTKEQVKKLERRHYTGWGRLSAELIHGIRNKESRKTILDYLIDDGNSNRNFMQLINDDALSFKEEIAKAQVIGETDNLNQVVSDIAGSPAIKKGILQSLKIVDELVKIMGHQPENIVVEMARENQFTNQGRRNSQQRLKGLTDSIKEFGSQILKEHPVENSQLQNDRLFLYYLQNGRDMYTGEELDIDYLSQYDIDHIIPQAFIKDNSIDNRVLTSSKENRGKSDDVPSKDVVRKMKSYWSKLLSAKLITQRKFDNLTKAERGGLTDDDKAGFIKRQLVETRQITKHVARILDERFNTETDENNKKIRQVKIVTLKSNLVSNFRKEFELYKVREINDYHHAHDAYLNAVIGKALLGVYPQLEPEFVYGDYPHFHGHKENKATAKKFFYSNIMNFFKKDDVRTDKNGEIIWKKDEHISNIKKVLSYPQVNIVKKVEEQTGGFSKESILPKGNSDKLIPRKTKKFYWDTKKYGGFDSPIVAYSILVIADIEKGKSKKLKTVKALVGVTIMEKMTFERDPVAFLERKGYRNVQEENIIKLPKYSLFKLENGRKRLLASARELQKGNEIVLPNHLGTLLYHAKNIHKVDEPKHLDYVDKHKDEFKELLDVVSNFSKKYTLAEGNLEKIKELYAQNNGEDLKELASSFINLLTFTAIGAPATFKFFDKNIDRKRYTSTTEILNATLIHQSITGLYETRIDLNKLGGD

SEQ ID NO: 13 - protein, 1377 aa, Streptococcus agalactiae
MNKPYSIGLDIGTNSVGWSIITDDYKVPAKKMRVLGNTDKEYIKKNLIGALLFDGGNTAADRRLKRTARRRYTRRRNRILYLQEIFAEEMSKVDDSFFHRLEDSFLVEEDKRGSKYPIFATMQEEKYYHEKFPTIYHLRKELADKKEKADLRLVYLALAHIIKFRGHFLIEDDRFDVRNTDIQKQYQAFLEIFDTTFENNHLLSQNVDVEAILTDKISKSAKKDRILAQYPNQKSTGIFAEFLKLIVGNQADFKKHFNLEDKTPLQFAKDSYDEDLENLLGQIGDEFADLFSVAKKLYDSVLLSGILTVTDLSTKAPLSASMIQRYDEHHEDLKHLKQFVKASLPENYREVFADSSKDGYAGYIEGKTNQEAFYKYLLKLLTKQEGSEYFLEKIKNEDFLRKQRTFDNGSIPHQVHLTELRAIIRRQSEYYPFLKENQDRIEKILTFRIPYYVGPLAREKSDFAWMTRKTDDSIRPWNFEDLVDKEKSAEAFIHRMTNNDLYLPEEKVLPKHSLIYEKFTVYNELTKVRFLAEGFKDFQFLNRKQKETIFNSLFKEKRKVTEKDIISFLNKVDGYEGIAIKGIEKQFNASLSTYHDLKKILGKDFLDNTDNELILEDIVQTLTLFEDREMIKKCLDIYKDFFTESQLKKLYRRHYTGWGRLSAKLINGIRNKENQKTILDYLIDDGSANRNFMQLINDDDLSFKPIIDKARTGSHSDNLKEVVGELAGSPAIKKGILQSLKIVDELVKVMGYEPEQIVVEMARENQTTAKGLSRSRQRLTTLRESLANLKSNILEEKKPKYVKDQVENHHLSDDRLFLYYLQNGRDMYTKKALDIDNLSQYDIDHIIPQAFIKDDSIDNRVLVSSAKNRGKSDDVPSIEIVKARKMFWKNLLDAKLMSQRKYDNLTKAERGGLTSDDKARFIQRQLVETRQITKHVARILDERFNNEVDNGKKICKVKIVTLKSNLVSNFRKEFGFYKIREVNDYHHAHDAYLNAVVAKAILTKYPQLEPEFVYGMYRQKKLSKIVHEDKEEKYSEATRKMFFYSNLMNMFKRVVRLADGSIVVRPVIETGRYMRKTAWDKKKHFATVRKVLSYPQNNIVKKTEIQTGGFSKESILAHGNSDKLIPRKTKDIYLDPKKYGGFDSPIVAYSVLVVADIKKGKAQKLKTVTELLGITIMERSRFEKNPSAFLESKGYLNIRDDKLMILPKYSLFELENGRRRLLASAGELQKGNELALPTQFMKFLYLASRYNESKGKPEEIEKKQEFVNQHVSYFDDILQLINDFSKRVILADANLEKINKLYQDNKENIPVDELANNIINLFTFTSLGAPAAFKFFDKIVDRKRYTSTKEVLNSTLIHQSITGLYETRIDLGKLGED

SEQ ID NO: 14 - protein, 131 aa, Helicobacter hepaticus
MRILGFDIGITSIGWAYVESNELKDCGVRIFTKAENPKNGDSLAAPRREARGARRRLARRKARLNAIKRLLCKEFELNLNDYLANDGELPKAYQTSKDTKSPYELYTAFHWIIFAFCSIASSLSNRQMLPI

SEQ ID NO: 15 - protein, 1059 aa, Wolinella succinogenes
MIERILGVDLGISSLGWAIVEYDKDDEAANRIIDCGVRLFTAAETPKKKESPNKARREARGIRRVLNRRRVRMNMIKKLFLRAGLIQDVDLDGEGGMFYSKANRADVWELRHDGLYRLLKGDELARVLIHIAKHRGYKFIGDDEADEESGKVKKAGVVLRQNFEAAGCRTVGEWLWRERGANGKKRNKHGDYEISIHRDLLVEEVEAIFVAQQEMRSTIATDALKAAYREIAFFVRPMQRIEKMVGHCTYFPEERRAPKSAPTAEKFIAISKFFSTVIIDNEGWEQKIIERKTLEELLDFAVSREKVEFRHLRKFLDLSDNEIFKGLHYKGKPKTAKKREATLFDPNEPTELEFDKVEAEKKAWISLRGAAKLREALGNEFYGRFVALGKHADEATKILTYYKDEGQKRRELTKLPLEAEMVERLVKIGFSDFLKLSLKAIRDILPAMESGARYDEAVLMLGVPHKEKSAILPPLNKTDIDILNPTVIRAFAQFRKVANALVRKYGAFDRVHFELAREINTKGEIEDIKESQRKNEKERKEAADWIAETSFQVPLTRKNILKKRLYIQQDGRCAYTGDVIELERLFDEGYCEIDHILPRSRSADDSFANKVLCLARANQQKTDRTPYEWFGHDAARWNAFETRTSAPSNRVRTGKGKIDRLLKKNFDENSEMAFKDRNLNDTRYMARAIKTYCEQYWVFKNSHTKAPVQVRSGKLTSVLRYQWGLESKDRESHTHHAVDAIIIAFSTQGMVQKLSEYYRFKETHREKERPKLAVPLANFRDAVEEATRIENTETVKEGVEVKRLLISRPPRARVTGQAHEQTAKPYPRIKQVKNKKKWRLAPIDEEKFESFKADRVASANQKNFYETSTIPRVDVYHKKGKFHLVPIYLHEMVLNELPNLSLGTNPEAMDENFFKFSIFKDDLISIQTQGTPKKPAKIIMGYFKNMHGANMVLSSINNSPCEGFTCTPVSMDKKHKDKCKLCPEENRIAGRCLQGFLDYWSQEGLRPPRKEFECDQGVKFALDVKKYQIDPLGYYYEVKQEKRLGTIPQMRSAKKLVKK

SEQ ID NO: 16 - protein, 1409 aa, Wolinella succinogenes
MLVSPISVDLGGKNTGFFSFTDSLDNSQSGTVIYDESFVLSQVGRRSKRHSKRNNLRNKLVKRLFLLILQEHHGLSIDVLPDEIRGLFNKRGYTYAGFELDEKKKDALESDTLKEFLSEKLQSIDRDSDVEDFLNQIASNAESFKDYKKGFEAVFASATHSPNKKLELKDELKSEYGENAKELLAGLRVTKEILDEFDKQENQGNLPRAKYFEELGEYIATNEKVKSFFDSNSLKLTDMTKLIGNISNYQLKELRRYFNDKEMEKGDIWIPNKLHKITERFVRSWHPKNDADRQRRAELMKDLKSKEIMELLTTTEPVMTIPPYDDMNNRGAVKCQTLRLNEEYLDKHLPNWRDIAKRLNHGKFNDDLADSTVKGYSEDSTLLHRLLDTSKEIDIYELRGKKPNELLVKTLGQSDANRLYGFAQNYYELIRQKVRAGIWVPVKNKDDSLNLEDNSNMLKRCNHNPPHKKNQIHNLVAGILGVKLDEAKFAEFEKELWSAKVGNKKLSAYCKNIEELRKTHGNTFKIDIEELRKKDPAELSKEEKAKLRLTDDVILNEWSQKIANFFDIDDKHRQRFNNLFSMAQLHTVIDTPRSGFSSTCKRCTAENRFRSETAFYNDETGEFHKKATATCQRLPADTQRPFSGKIERYIDKLGYELAKIKAKELEGMEAKEIKVPIILEQNAFEYEESLRKSKTGSNDRVINSKKDRDGKKLAKAKENAEDRLKDKDKRIKAFSSGICPYCGDTIGDDGEIDHILPRSHTLKIYGTVFNPEGNLIYVHQKCNQAKADSIYKLSDIKAGVSAQWIEEQVANIKGYKTFSVLSAEQQKAFRYALFLQNDNEAYKKVVDWLRTDQSARVNGTQKYLAKKIQEKLTKMLPNKHLSFEFILADATEVSELRRQYARQNPLLAKAEKQAPSSHAIDAVMAFVARYQKVFKDGTPPNADEVAKLAMLDSWNPASNEPLTKGLSTNQKIEKMIKSGDYGQKNMREVFGKSIFGENAIGERYKPIVVQEGGYYIGYPATVKKGYELKNCKVVTSKNDIAKLEKIIKNQDLISLKENQYIKIFSINKQTISELSNRYFNMNYKNLVERDKEIVGLLEFIVENCRYYTKKVDVKFAPKYIHETKYPFYDDWRRFDEAWRYLQENQNKTSSKDRFVIDKSSLNEYYQPDKNEYKLDVDTQPIWDDFCRWYFLDRYKTANDKKSIRIKARKTFSLLAESGVQGKVFRAKRKIPTGYAYQALPMDNNVIAGDYANILLEANSKTLSLVPKSGISIEKQLDKKLDVIKKTDVRGLAIDNNSFFNADFDTHGIRLIVENTSVKVGNFPISAIDKSAKRMIFRALFEKEKGKRKKKTTISFKESGPVQDYLKVFLKKIVKIQLRTDGSISNIVVRKNAADFTLSFRSEHIQKLLK

SEQ ID NO: 17 - protein, 1374 aa, Fusobacterium nucleatum
MKKQKFSDYYLGFDIGTNSVGWCVTDLDYNVLRFNKKDMWGSRLFDEAKTAAERRVQRNSRRRLKRRKWRLNLLEEIFSDEIMKIDSNFFRRLKESSLWLEDKNSKEKFTLFNDDNYKDYDFYKQYPTIFHLRDELIKNPEKKDIRLIYLALHSIFKSRGHFLFEGQNLKEIKNFETLYNNLISFLEDNGINKSIDKDNIEKLEKIICDSGKGLKDKEKEFKGIFNSDKQLVAIFKLSVGSSVSLNDLFDTDEYKKEEVEKEKISFREQIYEDDKPIYYSILGEKIELLDIAKSFYDFMVLNNILSDSNYISEAKVKLYEEHKKDLKNLKYIIRKYNKENYDKLFKDKNENNYPAYIGLNKEKDKKEVVEKSRLKIDDLIKVIKGYLPKPERIEEKDKTIFNEILNKIELKTILPKQRISDNGTLPYQIHEVELEKILENQSKYYDFLNYEENGVSTKDKLLKTFKFRIPYYVGPLNSYHKDKGGNSWIVRKEEGKILPWNFEQKVDIEKSAEEFIKRMTNKCTYLNGEDVIPKDSFLYSEYIILNELNKVQVNDEFLNEENKRKIIDELFKENKKVSEKKFKEYLLVNQIANRTVELKGIKDSFNSNYVSYIKFKDIFGEKLNLDIYKEISEKSILWKCLYGDDKKIFEKKIKNEYGDILNKDEIKKINSFKFNTWGRLSEKLLTGIEFINLETGECYSSVMEALRRTNYNLMELLSSKFTLQESIDNENKEMNEVSYRDLIEESYVSPSLKRAILQTLKIYEEIKKITGRVPKKVFIEMARGGDESMKNKKIPARQEQLKKLYDSCGNDIANFSIDIKEMKNSLSSYDNNSLRQKKLYLYYLQFGKCMYTGREIDLDRLLQNNDTYDIDHIYPRSKVIKDDSFDNLVLVLKNENAEKSNEYPVKKEIQEKMKSFWRFLKEKNFISDEKYKRLTGKDDFELRGFMARQLVNVRQTTKEVGKILQQIEPEIKIVYSKAEIASSFREMFDFIKVRELNDTHHAKDAYLNIVAGNVYNTKFTEKPYRYLQEIKENYDVKKIYNYDIKNAWDKENSLEIVKKNMEKNTVNITRFIKEEKGELFNLNPIKKGETSNEIISIKPKLYDGKDNKLNEKYGYYTSLKAAYFIYVEHEKKNKKVKTFERITRIDSTLIKNEKNLIKYLVSQKKLLNPKIIKKIYKEQTLIIDSYPYTFTGVDSNKKVELKNKKQLYLEKKYEQILKNALKFVEDNQGETEENYKFIYLKKRNNNEKNETIDAVKERYNIEFNEMYDKFLEKLSSKDYKNYINNKLYTNFLNSKEKFKKLKLWEKSLILREFLKIFNKNTYGKYEIKDSQTKEKLFSFPEDTGRIRLGQSSLGNNKELLEESVTGLFVKKIKL

SEQ ID NO: 18 - protein, 1084 aa, Corynebacterium diphtheriae
MKYHVGIDVGTFSVGLAAIEVDDAGMPIKTLSLVSHIHDSGLDPDEIKSAVTRLASSGIARRTRRLYRRKRRRLQQLDKFIQRQGWPVIELEDYSDPLYPWKVRAELAASYIADEKERGEKLSVALRHIARHRGWRNPYAKVSSLYLPDGPSDAFKAIREEIKRASGQPVPETATVGQMVTLCELGTLKLRGEGGVLSARLQQSDYAREIQEICRMQEIGQELYRKIIDVVFAAESPKGSASSRVGKDPLQPGKNRALKASDAFQRYRIAALIGNLRVRVDGEKRILSVEEKNLVFDHLVNLTPKKEPEWVTIAEILGIDRGQLIGTATMTDDGERAGARPPTHDTNRSIVNSRIAPLVDWWKTASALEQHAMVKALSNAEVDDFDSPEGAKVQAFFADLDDDVHAKLDSLHLPVGRAAYSEDTLVRLTRRMLSDGVDLYTARLQEFGIEPSWTPPTPRIGEPVGNPAVDRVLKTVSRWLESATKTWGAPERVIIEHVREGFVTEKRAREMDGDMRRRAARNAKLFQEMQEKLNVQGKPSRADLWRYQSVQRQNCQCAYCGSPITFSNSEMDHIVPRAGQGSTNTRENLVAVCHRCNQSKGNTPFAIWAKNTSIEGVSVKEAVERTRHWVTDTGMRSTDFKKFTKAVVERFQRATMDEEIDARSMESVAWMANELRSRVAQHFASHGTTVRVYRGSLTAEARRASGISGKLKFFDGVGKSRLDRRHHAIDAAVIAFTSDYVAETLAVRSNLKQSQAHRQEAPQWREFTGKDAEHRAAWRVWCQKMEKLSALLTEDLRDDRVVVMSNVRLRLGNGSAHKETIGKLSKVKLSSQLSVSDIDKASSEALWCALTREPGFDPKEGLPANPERHIRVNGTHVYAGDNIGLFPVSAGSIALRGGYAELGSSFHHARVYKITSGKKPAFAMLRVYTIDLLPYRNQDLFSVELKPQTMSMRQAEKKLRDALATGNAEYLGWLVVDDELVVDTSKIATDQVKAVEAELGTIRRWRVDGFFSPSKLRLRPLQMSKEGIKKESAPELSKIIDRPGWLPAVNKLFSDGNVTVVRRDSLGRVRLESTAHLPVTWKVQ

SEQ ID NO: 19 - protein, 1395 aa, Treponema denticola
MKKEIKDYFLGLDVGTGSVGWAVTDTDYKLLKANRKDLWGMRCFETAETAEVRRLHRGARRRIERRKKRIKLLQELFSQEIAKTDEGFFQRMKESPFYAEDKTILQENTLFNDKDFADKTYHKAYPTINHLIKAWIENKVKPDPRLLYLACHNIIKKRGHFLFEGDFDSENQFDTSIQALFEYLREDMEVDIDADSQKVKEILKDSSLKNSEKQSRLNKILGLKPSDKQKKAITNLISGNKINFADLYDNPDLKDAEKNSISFSKDDFDALSDDLASILGDSFELLLKAKAVYNCSVLSKVIGDEQYLSFAKVKIYEKHKTDLTKLKNVIKKHFPKDYKKVFGYNKNEKNNNNYSGYVGVCKTKSKKLIINNSVNQEDFYKFLKTILSAKSEIKEVNDILTEIETGTFLPKQISKSNAEIPYQLRKMELEKILSNAEKHFSFLKQKDEKGLSHSEKIIMLLTFKIPYYIGPINDNHKKFFPDRCWVVKKEKSPSGKTTPWNFFDHIDKEKTAEAFITSRTNFCTYLVGESVLPKSSLLYSEYTVLNEINNLQIIIDGKNICDIKLKQKIYEDLFKKYKKITQKQISTFIKHEGICNKTDEVIILGIDKECTSSLKSYIELKNIFGKQVDEISTKNMLEEIIRWATIYDEGEGKTILKTKIKAEYGKYCSDEQIKKILNLKFSGWGRLSRKFLETVTSEMPGFSEPVNIITAMRETQNNLMELLSSEFTFTENIKKINSGFEDAEKQFSYDGLVKPLFLSPSVKKMLWQTLKLVKEISHITQAPPKKIFIEMAKGAELEPARTKTRLKILQDLYNNCKNDADAFSSEIKDLSGKIENEDNLRLRSDKLYLYYTQLGKCMYCGKPIEIGHVFDTSNYDIDHIYPQSKIKDDSISNRVLVCSSCNKNKEDKYPLKSEIQSKQRGFWNFLQRNNFISLEKLNRLTRATPISDDETAKFIARQLVETRQATKVAAKVLEKMFPETKIVYSKAETVSMFRNKFDIVKCREINDFHHAHDAYLNIVVGNVYNTKFTNNPWNFIKEKRDNPKIADTYNYYKVFDYDVKRNNITAWEKGKTIITVKDMLKRNTPIYTRQAACKKGELFNQTIMKKGLGQHPLKKEGPFSNISKYGGYNKVSAAYYTLIEYEEKGNKIRSLETIPLYLVKDIQKDQDVLKSYLTDLLGKKEFKILVPKIKINSLLKINGFPCHITGKTNDSFLLRPAVQFCCSNNEVLYFKKIIRFSEIRSQREKIGKTISPYEDLSFRSYIKENLWKKTKNDEIGEKEFYDLLQKKNLEIYDMLLTKHKDTIYKKRPNSATIDILVKGKEKFKSLIIENQFEVILEILKLFSATRNVSDLQHIGGSKYSGVAKIGNKISSLDNCILIYQSITGIFEKRIDLLKV

SEQ ID NO: 20 - protein, 1334 aa, Listeria monocytogenes
MKNPYTIGLDIGTNSVGWAVLTNQYDLVKRKMKVAGNSDKKQIKKNFWGVRLFDDGQTAVDRRMNRTARRRIERRRNRISYLQEIFAVEMANIDANFFCRLNDSFYVDSEKRNSRHPFFATIEEEVAYHDNYRTIYHLREKLVNSSEKADLRLVYLALAHIIKYRGNFLIEGALDTKNTSVDEVYKQFIETYNQVFMSNIEEGALAKVEENIEVANILAGKFTRREKFERILQLYPGEKSTGMFAQFISLIVGSKGNFQKVFDLIEKTDIECAKDSYEEDLETLLAIIGDEYAELFVAAKNTYNAVVLSSIITVTDTETNAKLSASMIERFDAHEKDLVELKAFIKLNLPKQYEEIFSNAAIDGYAGYIDGKTKQVDFYKYLKTILENIEGSDYFIAKIEEENFLRKQRTFDNGAIPHQLHLEELEAIIHQQAKYYPFLKEDYDKIKSLVTFRIPYFVGPLANGQSEFAWLTRKADGEIRPWNIEEKVDFGKSAVDFIEKMTNKDTYLPKENVLPKHSLCYQKYMVYNELTKIRYIDDQGKTNYFSGREKQQVFNDLFKQKRKVKKKDLELFLRNINHIESPTIEGLEDSFNASYATYHDLLKVGMKQEILDNPLNTEMLEDIVKILTVFEDKPMIKEQLQQFSDVLDGGVLKKLERRHYTGWGRLSAKLLVGIREKQSHLTILDYLMNDDGLNRNLMQLINDSNLSFKSIIEKEQVSTTDKDLQSIVAELAGSPAIKKGILQSLKIVDELVSIMGYPPQTIVVEMARENQTTGKGKNNSKPRYKSLEKAIKEFGSQILKEHPTDNQELKNNRLYLYYLQNGKDMYTGQELDIHNLSNYDIDHIVPQSFITDNSIDNLVLTSSAGNREKGGDVPPLEIVRKRKVFWEKLYQGNLMSKRKFDYLTKAERGGLTEADKARFIHRQLVETRQITKNVANILYQRFNKETDNHGNTMEQVRIVTLKSALVSQFRKQFQLYKVREVNGYHHAHDAYLNGVVANTLLKVYPQLEPEFVYGEYHQFDWFKANKATAKKQFYTNIMLFFAQKERIIDENGEILWDKKYLETIKKVLDYRQMNIVKKTEIQKGEFSKATIKPKGNSSKLIPRKENWDPMKYGGLDSPNMAYAVIIEHAKGKKKIVIEKKLIQINIMERKMFEKDEEAFLEEKGYRHPKVLTKLPKYTLYECEKGRRRMLASANEAQKGNQLVLSNHLVSLLYHAKNCEASDGKSLKYIEAHRETFSELLAQVSEFATRYTLADANLSKINNLFEQNKEGDIKAIAQSFVDLMAFNAMGAPASFKFFEATIDRKRYTNLKELLSSTIIYQSITGLYESRKRLDD

SEQ ID NO: 21 - protein, 1236 aa, Mycoplasma mobile
MYFYKNKENKLNKKVVLGLDLGIASVGWCLTDISQKEDNKFPIILHGVRLFETVDDSDDKLLNETRRKKRGQRRRNRRLFTRKRDFIKYLIDNNIIELEFDKNPKILVRNFIEKYINPFSKNLELKYKSVTNLPIGFHNLRKAAINEKYKLDKSELIVLLYFYLSLRGAFFDNPEDTKSKEMNKNEIEIFDKNESIKNAEFPIDKIIEFYKISGKIRSTINLKFGHQDYLKEIKQVFEKQNIDFMNYEKFAMEEKSFFSRIRNYSEGPGNEKSFSKYGLYANENGNPELIINEKGQKIYTKIFKTLWESKIGKCSYDKKLYRAPKNSFSAKVFDITNKLTDWKHKNEYISERLKRKILLSRFLNKDSKSAVEKILKEENIKFENLSEIAYNKDDNKINLPIINAYHSLTTIFKKHLINFENYLISNENDLSKLMSFYKQQSEKLFVPNEKGSYEINQNNNVLHIFDAISNILNKFSTIQDRIRILEGYFEFSNLKKDVKSSEIYSEIAKLREFSGTSSLSFGAYYKFIPNLISEGSKNYSTISYEEKALQNQKNNFSHSNLFEKTWVEDLIASPTVKRSLRQTMNLLKEIFKYSEKNNLEIEKIVVEVTRSSNNKHERKKIEGINKYRKEKYEELKKVYDLPNENTTLLKKLWLLRQQQGYDAYSLRKIEANDVINKPWNYDIDHIVPRSISFDDSFSNLVIVNKLDNAKKSNDLSAKQFIEKIYGIEKLKEAKENWGNWYLRNANGKAFNDKGKFIKLYTIDNLDEFDNSDFINRNLSDTSYITNALVNHLTFSNSKYKYSVVSVNGKQTSNLRNQIAFVGIKNNKETEREWKRPEGFKSINSNDFLIREEGKNDVKDDVLIKDRSFNGHHAEDAYFITIISQYFRSFKRIERLNVNYRKETRELDDLEKNNIKFKEKASFDNFLLINALDELNEKLNQMRFSRMVITKKNTQLFNETLYSGKYDKGKNTIKKVEKLNLLDNRTDKIKKIEEFFDEDKLKENELTKLHIFNHDKNLYETLKIIWNEVKIEIKNKNLNEKNYFKYFVNKKLQEGKISFNEWVPILDNDFKIIRKIRYIKFSSEEKETDEIIFSQSNFLKIDQRQNFSFHNTLYWVQIWVYKNQKDQYCFISIDARNSKFEKDEIKINYEKLKTQKEKLQIINEEPILKINKGDLFENEEKELFYIVGRDEKPQKLEIKYILGKKIKDQKQIQKPVKKYFPNWKKVNLTYMGEIFKK

SEQ ID NO: 22 - protein, 1372 aa, Legionella pneumophila
MESSQILSPIGIDLGGKFTGVCLSHLEAFAELPNHANTKYSVILIDHNNFQLSQAQRRATRHRVRNKKRNQFVKRVALQLFQHILSRDLNAKEETALCHYLNNRGYTYVDTDLDEYIKDETTINLLKELLPSESEHNFIDWFLQKMQSSEFRKILVSKVEEKKDDKELKNAVKNIKNFITGFEKNSVEGHRHRKVYFENIKSDITKDNQLDSIKKKIPSVCLSNLLGHLSNLQWKNLHRYLAKNPKQFDEQTFGNEFLRMLKNFRHLKGSQESLAVRNLIQQLEQSQDYISILEKTPPEITIPPYEARTNTGMEKDQSLLLNPEKLNNLYPNWRNLIPGIIDAHPFLEKDLEHTKLRDRKRIISPSKQDEKRDSYILQRYLDLNKKIDKFKIKKQLSFLGQGKQLPANLIETQKEMETHFNSSLVSVLIQIASAYNKEREDAAQGIWFDNAFSLCELSNINPPRKQKILPLLVGAILSEDFINNKDKWAKFKIFWNTHKIGRTSLKSKCKEIEEARKNSGNAFKIDYEEALNHPEHSNNKALIKIIQTIPDIIQAIQSHLGHNDSQALIYHNPFSLSQLYTILETKRDGFHKNCVAVTCENYWRSQKTEIDPEISYASRLPADSVRPFDGVLARMMQRLAYEIAMAKWEQIKHIPDNSSLLIPIYLEQNRFEFEESFKKIKGSSSDKTLEQAIEKQNIQWEEKFQRIINASMNICPYKGASIGGQGEIDHIYPRSLSKKHFGVIFNSEVNLIYCSSQGNREKKEEHYLLEHLSPLYLKHQFGTDNVSDIKNFISQNVANIKKYISFHLLTPEQQKAARHALFLDYDDEAFKTITKFLMSQQKARVNGTQKFLGKQIMEFLSTLADSKQLQLEFSIKQITAEEVHDHRELLSKQEPKLVKSRQQSFPSHAIDATLTMSIGLKEFPQFSQELDNSWFINHLMPDEVHLNPVRSKEKYNKPNISSTPLFKDSLYAERFIPVWVKGETFAIGFSEKDLFEIKPSNKEKLFTLLKTYSTKNPGESLQELQAKSKAKWLYFPINKTLALEFLHHYFHKEIVTPDDTTVCHFINSLRYYTKKESITVKILKEPMPVLSVKFESSKKNVLGSFKHTIALPATKDWERLFNHPNFLALKANPAPNPKEFNEFIRKYFLSDNNPNSDIPNNGHNIKPQKHKAVRKVFSLPVIPGNAGTMMRIRRKDNKGQPLYQLQTIDDTPSMGIQINEDRLVKQEVLMDAYKTRNLSTIDGINNSEGQAYATFDNWLTLPVSTFKPEIIKLEMKPHSKTRRYIRITQSLADFIKTIDEALMIKPSDSIDDPLNMPNEIVCKNKLFGNELKPRDGKMKIVSTGKIVTYEFESDSTPQWIQTLYVTQLKKQP

SEQ ID NO: 23 - protein, 1122 aa, Streptococcus thermophilus
MSDLVLGLDIGIGSVGVGILNKVTGEIIHKNSRIFPAAQAENNLVRRTNRQGRRLTRRKKHRIVRLNRLFEESGLITDFTKISINLNPYQLRVKGLTDELSNEELFIALKNMVKHRGISYLDDASDDGNSSVGDYAQIVKENSKQLETKTPGQIQLERYQTYGQLRGDFTVEKDGKKHRLINVFPTSAYRSEALRILQTQQEFNSQITDEFINRYLEILTGKRKYYHGPGNEKSRTDYGRYRTNGETLDNIFGILIGKCTFYPDEFRAAKASYTAQEFNLLNDLNNLTVPTETKKLSKEQKNQIINYVKNEKVMGPAKLFKYIAKLLSCDVADIKGHRIDKSGKAEIHTFEAYRKMKTLETLDIEQMDRETLDKLAYVLTLNTEREGIQEALEHEFADGSFSQKQVDELVQFRKANSSIFGKGWHNFSVKLMMELIPELYETSEEQMTILTRLGKQKTTSSSNKTKYIDEKLLTEEIYNPVVAKSVRQAIKIVNAAIKEYGDFDNIVIEMARETNEDDEKKAIQKIQKANKDEKDAAMLKAANQYNGKAELPHSVFHGHKQLATKIRLWHQQGERCLYTGKTISIHDLINNPNQFEVDHILPLSITFDDSLANKVLVYATANQEKGQRTPYQALDSMDDAWSFRELKAFVRESKTLSNKKKEYLLTEEDISKFDVRKKFIERNLVDTRYASRVVLNALQEHFRAHKIDTKVSVVRGQFTSQLRRHWGIEKTRDTYHHHAVDALIIAASSQLNLWKKQKNTLVSYSEEQLLDIETGELISDDEYKESVFKAPYQHFVDTLKSKEFEDSILFSYQVDSKFNRKISDATIYATRQAKVGKDKKDETYVLGKIKDIYTQDGYDAFMKIYKKDKSKFLMYRHDPQTFEKVIEPILENYPNKEMNEKGKEVPCNPFLKYKEEHGYIRKYSKKGNGPEIKSLKYYDSKLLGNPIDITPENSKNKVVLQSLKPWRTDVYFNKNTGKYEILGLKYADLQFEKKTGTYKISQEKYNGIMKEEGVDSDSEFKFTLYKNDLLLVKDTETKEQQLFRFLSRTMPNVKYYVELKPYSKDKFEKNESLIEILGSADKSGRCIKGLGKSNISIYKVRTDVLGNQHIIKNEGDKPKLDF

SEQ ID NO: 24 - protein, 1128 aa, Streptococcus thermophilus
MSDLVLGLDIGIGSVGVGILNKVTGEIIHKNSRIFPAAQAENNLVRRTNRQGRRLTRRKKHRIVRLNRLFEESGLITDFTKISINLNPYQLRVKGLTDELSNEELFIALKNMVKHRGISYLDDASDDGNSSVGDYAQIVKENSKQLETKTPGQIQLERYQTYGQLRGDFTVEKDGKKHRLINVFPTSAYRSEALRILQTQQEFNPQITDEFINRYLEILTGKRKYYHGPGNEKSRTDYGRYRTSGETLDNIFGILIGKCTFYPEEFRAAKASYTAQEFNLLNDLNNLTVPTETKKLSKEQKNQIINYVKNEKAMGPAKLFKYIAKLLSCDVADIKGYRIDKSGKAEIHTFEAYRKMKTLETLDIEQMDRETLDKLAYVLTLNTEREGIQEALEHEFADGSFSQKQVDELVQFRKANSSIFGKGWHNFSVKLMMELIPELYETSEEQMTILTRLGKQKRLRLQIKQNISNKTKYIDEKLLTEEIYNPVVAKSVRQAIKIVNAAIKEYGDFDNIVIEMARETNEDDEKKAIQKIQKANKDEKDAAMLKAANQYNGKAELPHSVFHGHKQLATKIRLWHQQGERCLYTGKTISIHDLINNPNQFEVDHILPLSITFDDSLANKVLVYATANQEKGQRTPYQALDSMDDAWSFRELKAFVRESKTLSNKKKEYLLTEEDISKFDVRKKFIERNLVDTRYASRVVLNALQEHFRAHKIDTKVSVVRGQFTSQLRRHWGIEKTRDTYHHHAVDALIIAASSQLNLWKKQKNTLVSYSEEQLLDIETGELISDDEYKESVFKAPYQHFVDTLKSKEFEDSILFSYQVDSKFNRKISDATIYATRQAKVGKDKKDETYVLGKIKDIYTQDGYDAFMKIYKKDKSKFLMYRHDPQTFEKVIEPILENYPNKQMNEKGKEVPCNPFLKYKEEHGYIRKYSKKGNGPEIKSLKYYDSKLLGNPIDITPENSKNKVVLQSLKPWRTDVYFNKATGKYEILGLKYADLQFEKGTGTYKISQEKYNDIKKKEGVDSDSEFKFTLYKNDLLLVKDTETKEQQLFRFLSRTLPKQKHYVELKPYDKQKFEGGEALIKVLGNVANGGQCIKGLAKSNISIYKVRTDVLGNQHIIKNEGDKPKLDF

SEQ ID NO: 25 - protein, 1123 aa, Francisella tularensis
MNVKILPIAIDLDVKNTGVFSAFYQKGTSLEKLDNKNGKVYELSKDSYTLLMNNRTARRHKRRGIDRKQLVKRLFKLVWTEQLNLEWDKDTQQAISFLFNRRGFSFITDGYSTEYLNIVPEQVKAILMDIFDDYNGEDDLDSYLKLATEQESKISEIYNKLMQKILEFKLRKLCTDIKDDKVSTKTLKEITSYEFELLADYLANYSESLKTQKFSYTDKQGNLKELSYYHHDKYNIQEFLKRHATINDEILGTLLTDDFDIWNFNFEKFDFDKNEEKLQNQEDKDHTQAHLHHFVFVVNKIKSEMASGGRHRSQYFQEITNVLDENNHQEGYLKNFCENLHNKKYSNLSVKNLVNLVGNLSNLELKPLRKYFNDKIHAKADHWDEQKFTETYCHWILGEWRVGVKDQDKKDGAKYSYKDLCNELKQKVTKAGLIDFLLELDPCRTIPPYLDNNNRKPPKCQSLILNPKFLDNQYPNWQQYLQELKKLQSIQDYLDSFETDLKDLKSSKDQPYFVEYKSSNQQMASGQRDYKDLDARILQFIFDRVKASDELLLNEIYFQAKKLKQKASSELEKLESSKKLDEVIANSQLSQILKSQHTNGIFEQGTFLHLVCKYYKQRQRARDSRLYIMPEYRYDKKLDKYNNTGRFDDNNQLLTYCNHKPRQKRYQLLNDLAGVLQVSRNQLLSSVEEWFQQAQRVGEISKSQDEQIFEWLKSFKIASYCKAAVEMQKQYRGTLKNAIQTAIFRQSENINKNKNTGNQQQALSENSKDVKSLTADEKKLLKLIENIAKASQKIGESLGLNDKQIKKFNSIYSFAQIQQIAFAKRKGNANTCAVCSADNAHRMQQIKITELVEDNKDNIILSAKAQRLPAIPTRIVDGAVKKMATILAKNIVDDNWQNIKQVLSAKHQLHIPIITESNAFEFEPALADVKGKSLKDRRKKALERISPENIFKDKNNRIKEFAKGISAYSGANLTDGDFDGAKEELDHIIPRSHKKYGTLNDEANLICVTRDDNKNIFAIDTSKWFEIETPSDLRDIGVATIQYKIDNNSRPKVRVKLDYVIDDDSKINYFMNHSLLKSRYPDKVLEILKQSTIIEFESSGFNKTIKEMLGMTLAGIYNETSNN

SEQ ID NO: 26 - protein, 1436 aa, Bacteroides fragilis
MKRILGLDLGTNSIGWALVNEAENKDERSSIVKLGVRVNPLTVDELTNFEKGKSITTNADRTLKRGMRRNLQRYKLRRETLTEVLKEHKLITEDTILSENGNRTTFETYRLRAKAVTEEISLEEFARVLLMINKKRGYKSSRKAKGVEEGTLIDGMDIARELYNNNLTPGELCLQLLDAGKKFLPDFYRSDLQNELDRIWEKQKEYYPEILTDVLKEELRGKKRDAVWAICAKYFVWKENYTEWNKEKGKTEQQEREHKLEGIYSKRKRDEAKRENLQWRVNGLKEKLSLEQLVIVFQEMNTQINNSSGYLGAISDRSKELYFNKQTVGQYQMEMLDKNPNASLRNMVFYRQDYLDEFNMLWEKQAVYHKELTEELKKEIRDIIIFYQRRLKSQKGLIGFCEFESRQIEVDIDGKKKIKTVGNRVISRSSPLFQEFKIWQILNNIEVTVVGKKRKRRKLKENYSALFEELNDAEQLELNGSRRLCQEEKELLAQELFIRDKMTKSEVLKLLFDNPQELDLNFKTIDGNKTGYALFQAYSKMIEMSGHEPVDFKKPVEKVVEYIKAVFDLLNWNTDILGFNSNEELDNQPYYKLWHLLYSFEGDNTPTGNGRLIQKMTELYGFEKEYATILANVSFQDDYGSLSAKAIHKILPHLKEGNRYDVACVYAGYRHSESSLTREEIANKVLKDRLMLLPKNSLHNPVVEKILNQMVNVINVIIDIYGKPDEIRVELARELKKNAKEREELTKSIAQTTKAHEEYKTLLQTEFGLTNVSRTDILRYKLYKELESCGYKTLYSNTYISREKLFSKEFDIEHIIPQARLFDDSFSNKTLEARSVNIEKGNKTAYDFVKEKFGESGADNSLEHYLNNIEDLFKSGKISKTKYNKLKMAEQDIPDGFIERDLRNTQYIAKKALSMLNEISHRVVATSGSVTDKLREDWQLIDVMKELNWEKYKALGLVEYFEDRDGRQIGRIKDWTKRNDHRHHAMDALTVAFTKDVFIQYFNNKNASLDPNANEHAIKNKYFQNGRAIAPMPLREFRAEAKKHLENTLISIKAKNKVITGNINKTRKKGGVNKNMQQTPRGQLHLETIYGSGKQYLTKEEKVNASFDMRKIGTVSKSAYRDALLKRLYENDNDPKKAFAGKNSLDKQPIWLDKEQMRKVPEKVKIVTLEAIYTIRKEISPDLKVDKVIDVGVRKILIDRLNEYGNDAKKAFSNLDKNPIWLNKEKGISIKRVTISGISNAQSLHVKKDKDGKPILDENGRNIPVDFVNTGNNHHVAVYYRPVIDKRGQLVVDEAGNPKYELEEVVVSFFEAVTRANLGLPIIDKDYKTTEGWQFLFSMKQNEYFVFPNEKTGFNPKEIDLLDVENYGLISPNLFRVQKFSLKNYVFRHHLETTIKDTSSILRGITWIDFRSSKGLDTIVKVRVNHIGQIVSVGEY

SEQ ID NO: 27 - protein, 1314 aa, Mycoplasma synoviae
MLRLYCANNLVLNNVQNLWKYLLLLIFDKKIIFLFKIKVILIRRYMENNNKEKIVIGFDLGVASVGWSIVNAETKEVIDLGVRLFSEPEKADYRRAKRTTRRLLRRKKFKREKFHKLILKNAEIFGLQSRNEILNVYKDQSSKYRNILKLKINALKEEIKPSELVWILRDYLQNRGYFYKNEKLTDEFVSNSFPSKKLHEHYEKYGFFRGSVKLDNKLDNKKDKAKEKDEEEESDAKKESEELIFSNKQWINEIVKVFENQSYLTESFKEEYLKLFNYVRPFNKGPGSKNSRTAYGVFSTDIDPETNKFKDYSNIWDKTIGKCSLFEEEIRAPKNLPSALIFNLQNEICTIKNEFTEFKNWWLNAEQKSEILKFVFTELFNWKDKKYSDKKFNKNLQDKIKKYLLNFALENFNLNEEILKNRDLENDTVLGLKGVKYYEKSNATADAALEFSSLKPLYVFIKFLKEKKLDLNYLLGLENTEILYFLDSIYLAISYSSDLKERNEWFKKLLKELYPKIKNNNLEIIENVEDIFEITDQEKFESFSKTHSLSREAFNHIIPLLLSNNEGKNYESLKHSNEELKKRTEKAELKAQQNQKYLKDNFLKEALVPLSVKTSVLQAIKIFNQIIKNFGKKYEISQVVIEMARELTKPNLEKLLNNATNSNIKILKEKLDQTEKFDDFTKKKFIDKIENSVVFRNKLFLWFEQDRKDPYTQLDIKINEIEDETEIDHVIPYSKSADDSWFNKLLVKKSTNQLKKNKTVWEYYQNESDPEAKWNKFVAWAKRIYLVQKSDKESKDNSEKNSIFKNKKPNLKFKNITKKLFDPYKDLGFLARNLNDTRYATKVFRDQLNNYSKHHSKDDENKLFKVVCMNGSITSFLRKSMWRKNEEQVYRFNFWKKDRDQFFHHAVDASIIAIFSLLTKTLYNKLRVYESYDVQRREDGVYLINKETGEVKKADKDYWKDQHNFLKIRENAIEIKNVLNNVDFQNQVRYSRKANTKLNTQLFNETLYGVKEFENNFYKLEKVNLFSRKDLRKFILEDLNEESEKNKKNENGSRKRILTEKYIVDEILQILENEEFKDSKSDINALNKYMDSLPSKFSEFFSQDFINKCKKENSLILTFDAIKHNDPKKVIKIKNLKFFREDATLKNKQAVHKDSKNQIKSFYESYKCVGFIWLKNKNDLEESIFVPINSRVIHFGDKDKDIFDFDSYNKEKLLNEINLKRPENKKFNSINEIEFVKFVKPGALLLNFENQQIYYISTLESSSLRAKIKLLNKMDKGKAVSMKKITNPDEYKIIEHVNPLGINLNWTKKLENNN

SEQ ID NO: 28 - protein, 1368 aa, Streptococcus pyogenes
MDKKYSIGLDIGTNSVGWAVITDDYKVPSKKFKVLGNTDRHSIKKNLIGALLFDSGETAEATRLKRTARRRYTRRKNRICYLQEIFSNEMAKVDDSFFHRLEESFLVEEDKKHERHPIFGNIVDEVAYHEKYPTIYHLRKKLVDSTDKADLRLIYLALAHMIKFRGHFLIEGDLNPDNSDVDKLFIQLVQTYNQLFEENPINASGVDAKAILSARLSKSRRLENLIAQLPGEKKNGLFGNLIALSLGLTPNFKSNFDLAEDAKLQLSKDTYDDDLDNLLAQIGDQYADLFLAAKNLSDAILLSDILRLNSEITKAPLSASMIKRYDEHHQDLTLLKALVRQQLPEKYKEIFFDQSKNGYAGYIDGGASQEEFYKFIKPILEKMDGTEELLAKLNREDLLRKQRTFDNGSIPHQIHLGELHAILRRQEDFYPFLKDNREKIEKILTFRIPYYVGPLARGNSRFAWMTRKSEETITPWNFEEVVDKGASAQSFIERMTNFDKNLPNEKVLPKHSLLYEYFTVYNELTKVKYVTEGMRKPAFLSGEQKKAIVDLLFKTNRKVTVKQLKEDYFKKIECFDSVEISGVEDRFNASLGTYHDLLKIIKDKDFLDNEENEDILEDIVLTLTLFEDREMIEERLKTYAHLFDDKVMKQLKRRRYTGWGRLSRKLINGIRDKQSGKTILDFLKSDGFANRNFMQLIHDDSLTFKEDIQKAQVSGQGDSLHEHIANLAGSPAIKKGILQTVKVVDELVKVMGRHKPENIVIEMARENQTTQKGQKNSRERMKRIEEGIKELGSQILKEHPVENTQLQNEKLYLYYLQNGRDMYVDQELDINRLSDYDVDHIVPQSFIKDDSIDNKVLTRSDKNRGKSNNVPSEEVVKKMKNYWRQLLNAKLITQRKFDNLTKAERGGLSELDKAGFIKRQLVETRQITKHVAQILDSRMNTKYDENDKLIREVKVITLKSKLVSDFRKDFQFYKVREINNYHHAHDAYLNAVVGTALIKKYPKLESEFVYGDYKVYDVRKMIAKSEQEIGKATAKYFFYSNIMNFFKTEITLANGEIRKRPLIETNGETGEIVWDKGRDFATVRKVLSMPQVNIVKKTEVQTGGFSKESILPKRNSDKLIARKKDWDPKKYGGFDSPTVAYSVLVVAKVEKGKSKKLKSVKELLGITIMERSSFEKNPIDFLEAKGYKEVRKDLIVKLPKYSLFELENGRKRMLASAGELQKGNELALPSKYVNFLYLASHYEKLKGSPEDNEQKQLFVEQHKHYLDEIIEQISEFSKRVILADANLDKVLSAYNKHRDKPIREQAENIIHLFTLTNLGAPAAFKYFDTTIDRKRYTSTKEVLDATFIHQSITGLYETRIDLSQLGGD

SEQ ID NO: 29 - protein, 1368 aa, Streptococcus pyogenes
MDKKYSIGLDIGTNSVGWAVITDDYKVPSKKFKVLGNTDRHSIKKNLIGALLFDSGETAEATRLKRTARRRYTRRKNRICYLQEIFSNEMAKVDDSFFHRLEESFLVEEDKKHERHPIFGNIVDEVAYHEKYPTIYHLRKKLVDSTDKADLRLIYLALAHMIKFRGHFLIEGDLNPDNSDVDKLFIQLVQTYNQLFEENPINASGVDAKAILSARLSKSRRLENLIAQLPGEKKNGLFGNLIALSLGLTPNFKSNFDLAEDAKLQLSKDTYDDDLDNLLAQIGDQYADLFLAAKNLSDAILLSDILRVNTEITKAPLSASMIKRYDEHHQDLTLLKALVRQQLPEKYKEIFFDQSKNGYAGYIDGGASQEEFYKFIKPILEKMDGTEELLVKLNREDLLRKQRTFDNGSIPHQIHLGELHAILRRQEDFYPFLKDNREKIEKILTFRIPYYVGPLARGNSRFAWMTRKSEETITPWNFEEVVDKGASAQSFIERMTNFDKNLPNEKVLPKHSLLYEYFTVYNELTKVKYVTEGMRKPAFLSGEQKKAIVDLLFKTNRKVTVKQLKEDYFKKIECFDSVEISGVEDRFNASLGTYHDLLKIIKDKDFLDNEENEDILEDIVLTLTLFEDREMIEERLKTYAHLFDDKVMKQLKRRRYTGWGRLSRKLINGIRDKQSGKTILDFLKSDGFANRNFMQLIHDDSLTFKEDIQKAQVSGQGDSLHEHIANLAGSPAIKKGILQTVKVVDELVKVMGRHKPENIVIEMARENQTTQKGQKNSRERMKRIEEGIKELGSQILKEHPVENTQLQNEKLYLYYLQNGRDMYVDQELDINRLSDYDVDHIVPQSFLKDDSIDNKVLTRSDKNRGKSDNVPSEEVVKKMKNYWRQLLNAKLITQRKFDNLTKAERGGLSELDKAGFIKRQLVETRQITKHVAQILDSRMNTKYDENDKLIREVKVITLKSKLVSDFRKDFQFYKVREINNYHHAHDAYLNAVVGTALIKKYPKLESEFVYGDYKVYDVRKMIAKSEQEIGKATAKYFFYSNIMNFFKTEITLANGEIRKRPLIETNGETGEIVWDKGRDFATVRKVLSMPQVNIVKKTEVQTGGFSKESILPKRNSDKLIARKKDWDPKKYGGFDSPTVAYSVLVVAKVEKGKSKKLKSVKELLGITIMERSSFEKNPIDFLEAKGYKEVKKDLIIKLPKYSLFELENGRKRMLASAGELQKGNELALPSKYVNFLYLASHYEKLKGSPEDNEQKQLFVEQHKHYLDEIIEQISEFSKRVILADANLDKVLSAYNKHRDKPIREQAENIIHLFTLTNLGAPAAFKYFDTTIDRKRYTSTKEVLDATLIHQSITGLYETRIDLSQLGGD

SEQ ID NO: 30 - protein, 1370 aa, Streptococcus agalactiae; identical to SEQ ID NO: 11

SEQ ID NO: 31 - protein, 1173 aa, Rhodospirillum rubrum
MRPIEPWILGLDIGTDSLGWAVFSCEEKGPPTAKELLGGGVRLFDSGRDAKDHTSRQAERGAFRRARRQTRTWPWRRDRLIALFQAAGLTPPAAETRQIALALRREAVSRPLAPDALWAALLHLAHHRGFRSNRIDKRERAAAKALAKAKPAKATAKATAPAKEADDEAGFWEGAEAALRQRMAASGAPTVGALLADDLDRGQPVRMRYNQSDRDGVVAPTRALIAEELAEIVARQSSAYPGLDWPAVTRLVLDQRPLRSKGAGPCAFLPGEDRALRALPTVQDFIIRQTLANLRLPSTSADEPRPLTDEEHAKALALLSTARFVEWPALRRALGLKRGVKFTAETERNGAKQAARGTAGNLTEAILAPLIPGWSGWDLDRKDRVFSDLWAARQDRSALLALIGDPRGPTRVTEDETAEAVADAIQIVLPTGRASLSAKAARAIAQAMAPGIGYDEAVTLALGLHHSHRPRQERLARLPYYAAALPDVGLDGDPVGPPPAEDDGAAAEAYYGRIGNISVHIALNETRKIVNALLHRHGPILRLVMVETTRELKAGADERKRMIAEQAERERENAEIDVELRKSDRWMANARERRQRVRLARRQNNLCPYTSTPIGHADLLGDAYDIDHVIPLARGGRDSLDNMVLCQSDANKTKGDKTPWEAFHDKPGWIAQRDDFLARLDPQTAKALAWRFADDAGERVARKSAEDEDQGFLPRQLTDTGYIARVALRYLSLVTNEPNAVVATNGRLTGLLRLAWDITPGPAPRDLLPTPRDALRDDTAARRFLDGLTPPPLAKAVEGAVQARLAALGRSRVADAGLADALGLTLASLGGGGKNRADHRHHFIDAAMIAVTTRGLINQINQASGAGRILDLRKWPRTNFEPPYPTFRAEVMKQWDHIHPSIRPAHRDGGSLHAATVFGVRNRPDARVLVQRKPVEKLFLDANAKPLPADKIAEIIDGFASPRMAKRFKALLARYQAAHPEVPPALAALAVARDPAFGPRGMTANTVIAGRSDGDGEDAGLITPFRANPKAAVRTMGNAVYEVWEIQVKGRPRWTHRVLTRFDRTQPAPPPPPENARLVMRLRRGDLVYWPLESGDRLFLVKKMAVDGRLALWPARLATGKATALYAQLSCPNINLNGDQGYCVQSAEGIRKEKIRTTSCTALGRLRLSKKAT

SEQ ID NO: 32 - protein, 997 aa, Maritimibacter alkaliphilus
MKVLVDAGLMPSDPAAAKALETLDPYELRATGLDVMLPLTHLGRAVFHLNQRRGFKSNRKTDRGDNESGKIKDATKRLTWAMQEAGARTYGEFLHMRRARASDPRQVPSVRTRLSVASRGGPDSKEEAGYDFYPERAHLEDEFHALWSAQAAFHPDLTCELRDVVFEKIFYQRPLKEPKVGLCLFTAEERLPKAHPLTGRRVLYETVNQLRVTADGRTTRPLTLEERDMIVYALDNKKPVKSLSSMHLKLVALGKLVKLKDGERFTLESGVRDAIACDPIRATMGHPDGFGPAWSRLDWQAQWALIEKLRQVQSDDDFASLVAWLGATHNLSEDHAKRVANLHLPEGYGRLGLTATEAILCNLKAEVCTYSQAVERWGKHHSNQRTGECLEALPYYGEVLDRHVIPGTYNEDDDDVTRYGRITNPTVHIGLNQLRRLVNRIIATYGKPDQIVVELARELKQSEAQKSEALKKIRDTTADAIRRGRQLEEIGQKNTGANRLLLRLWEDLGPAVGPRCCPYTGKPISVTMLFDGACDVDHILPYSRTLDDSFANRTICLREANRQKGDRTPWEAWGGSDQWDAIEANLKDLPENKRKRFAPDAMERFEGERDFLDRALVDTQYLARISRAYLDTLFTEGGHVWVVPGRMTEMLRRHWGLNALLSDKDRGAGKVKNRTDHRHHAIDAAVIAATDHSLVNRISKAAGQGESAGQSAELIARDTPEPWEGFRNDISAQIARIVVSHRADHGRIDVEGRKHGKDSTAGRLHNDTAYGIVDDHTVVSRTPLLSLKPGDIEVTTKGKNIRDTQLQKALSVATTGKDGKGFEEALRNFAEKEGPYQGIRRVRLIETLQSSARVEVGSDEDGQPLKAYKGDSNHCYDLWKLPDGKVVPHVVSTYEAHAGTDKRPHPAAKRILRVFKKDMVAIEQDDQTAIFYVQKLDRANGLFLAPHLEANADARHRNPNDAFKFLQMGAGSVVRNKLRRVYVDEIGRIKDPGPPKH

SEQ ID NO: 33 - protein, 1027 aa, Blastopirellula marina
MFSESGDQPSLVDCGVRIFPEGVERDQQGGEKSKSQSRRVARGIRRQVRRRAQRLRHLKHALITTGLFPADVVDQQEVLASNPYELRSRALSEKLEPYEIGRILLHLAKRRGFLSNRTTDRSGGNELKGILAEMTQLQGEIAAHGCQTLGQYLHQLGDDGETFAQRLRGRHTLRAMYEDEFEKIWERQASYYPALLTEELRGGEEGKQSYPLVPTARRKSESLLKRFGLHGLLFFQRKMYWPKSVIGRCDLEPKEKRCPKADRLAQRFRILQEVNNLRLISPADRKEYTFAEFVGAGADKKLVDYLCEAKERTFPQIRKKFKLPETISFNYERGERSKLQGHETDAHFNGKKGLGKRRWSEIAEDVKDHIIQIVLEEDREDVALRKLTQDCSLTVEEAHKAMALHLPAGYSQYSRVAISRLLPHLELGKLLMGNDASDSAMHAAGYLRPDEREVRQYDLLPEPPDIPNPLVRQALYEVRKVINAIIREYGALGTIRVELAREAKKSAEQRTQIRIANAKRERENAAIAKTLQEMSPAIRPTRRNIQRYLLWKDQGGVCIYTGKVISQAQLFDSGEVDVDHILPRWRSLDDSMANKVIAHRSANNEKGDRTPWEWLGHDKPRFDELLLRAQRLPYGKRQRFIQKEVELTNFVERQLRDTTYVSRLVVQYLKGLGVPITTVKGPMTAELRHHWGLNALLNEDGSQKKNRSDHRHHAIDAIVIGLTDAKRLHALANARGKDLQPPWSEFRSDVATALGRMAVSHRVRRRIQGALHEETIYGPTQKAAQPTSTDQRPWAKDWIEDSQIVVRRKSVSDLTNTKHLAKIRDVTIRKILEDHLRRQKVDPTKPGVIPKDAFAGSNAPQMPSGVPIKKVRLVERGETWRKIGSGEASKFIKPGSNHHISYFAISRKGRESWKAHVTIMLDAACIAKESINNGKIVNRSIGDQGRFLMSLSIGEMFEITNNGGEILLCVVRKIDQSGRIYYKIHDDARESMDLKKDNLYMSPSKMQQFDARKVTVTPLGKIRNAND

SEQ ID NO: 34 - protein, 158 aa, Francisella tularensis
MIDFLLELDPCITIPPYLDNNNRKPPKCQSLILNPKFLDNQYPNWQQYLQELKKLQSIQDYLDSFETDLKDLKSSKDQPYFVEYKSSNQQMASGQRDYKDLDARILQFIFDRVKASDELLLSEIYFQAKKLKQKASSELEKLESSKKLDEVIANSQLS

SEQ ID NO: 35 - protein, 393 aa, Francisella tularensis
MNVKILPIAIDLDVKNTGVFSAFYQKGTSLEKLDNKNGKVYELSKDSYTLLMNNRTAQRHQRRGIDRKQLVKRLFKLVWTEQLNLEWDKDTQQAISFLFNRRGFSFITDGYSTEYLNIVPEQVKAILMDIFDDYNGEDDLDSYLKLATEQESKISEIYNKLMQKILEFKLRKLCTDIKDDKVSTKTLKEITSYEFELLADYLANYSESLKTQKFSYTDKQGNLKELSYYHHDKYNIQEFLKRHATINDEILDTLLTDDFDIWNFNFEKFDFDKNEEKLQSQEDKDHTQAYFHHFVFAVNKIKSEMASGGRHRSQYFQEITNVLDENNHQEGYLKNFCENLHNKKYSNLSVKNLVNLVGNLSNLELKPLRKYFNDKNLIIGMSKSLQKLIATGY

SEQ ID NO: 36 - protein, 1066 aa, Rhodopseudomonas palustris
MSERVVRRILGIDLGIASCGWGVVDISGAGGGIIATGVRCFDAPLIDKTGEPKSATRRTARGQRRIVRRRRQRMNGVRRLLCEFGLLPDPRPDALNQAMRRISTASAAAQVTPWTLRAAAHQRLLSNEELAVVLGHIARHRGFRSNAKNEAGANAADETSKMKKAMEATREGLAKYHAFGDMIANDPKFANRKRNRDKDYSHTAKRSDLEDEVRAILRAQLRFGSAAATETLAQTFADVAFFQRPLQDSEDRVGDCPFEPGQKRAARRAPSFELFRFLSRLANLKLAVGRSPERRLTAEEIALAAKGFGETKKTITFKSLREALDLDPNARFSGIGKDKEASLDVVARTGGAAYGTKTLKDALGDAPWRSLSRTPETLDRIAEILSFREDITSIRNGLEDLGLDSLVVEALMQAAANGDFKEFTRAGHISARAARNIIPGLREGLVYSEACARVGYDHAARLSVPLDQVGSPVTRKALSEALKQVRAVAREYGPIDYFHIELARSVGKSAEERKQLTDGIEARNVEKAKRRKQAEEHLGRAPSDDELLRYELAKEQNFKCIYSGDAIDPAGVAANDTRYQVDHILPWSRFGDDSYLNKTLCTARSNQNKRGRTPFEWFEADKTDVEWMEYVARVENLQEVKGRKKRNYSIKDAAAIEDKFKARNLTDTQWATRLLADELSRMFPPRECERAICGRADGGNDGLTIVEERRVFTRPGAITSKLRRAWGLEGLKKQDGKRVEDDRHHAVDALVLAATTESLLQRLTVEVQRREREGRPDDIFHCAEPWRGFRADVRRTVYGSETMPGIFVSRAERRRARGKAHDATIKQIREIEGERLVFERKPVEKLTDKDLEKIPIPKPYGQVSDPKRLRDELVESLRAWIAAGKPKDRPPLSPKGDVIRKVRIQTNDKVSVEINGGTVDRGDMARVDVFRKKNKKAVWEYYVVPIYPHQIVALNDPPDRAVIAYAEDKDWKEIDSSYEFLWSLFGLSYVEISKANGECIDGYFRGLHRGTGAASVCKHISLGKDATVSGIGLKTLASFKKFTIDRLGRKFEIPREVRTWRGEACT

SEQ ID NO: 37 - protein, 1149 aa, Lactobacillus salivarius
MERYHIGLDIGTSSIGWAVIGDDFKIKRKKGKNLIGVRLFKEGDTAAERRGFRTQRRRLNRRKWRLKLLEEIFDPYMAEVDKYFFARLKESNLSPKDSNKKYLGSLLFPDISDSNFYDKYPTIYHLRRDLMEKDKKFDLREIYLAIHHIVKYRGNFLEKVPAKNYKNSGASIGFLLEEVNDLYGNIIGNEDVAILDNDKFEDVEKIILNDEIRNIDKQKNVGRLLVKDKKEKNIVTAFSKAIFGYKFNLEDLLLIESDEKNKLTFNDENIDDIFNELSHSLNDNQMDLLTKTREIYFKFKLNMIVPTGYTISESMIEKYEMHKAHLKMYKEFINTLNAKDRKILKNAYSDYINNEKAKAANAQENFYKTVKKTIKENDSDTAKKIIGLIDEGNFMPKQRTGENGVIPHQLHQIELDRIIENQAKYYPWLAEENPVEKNRKFAKYKLDELVTFRVPYYVGPLIDKTESNKNEKETKFAWMVRKAKGTITPWNFENLVDRTESANRFIKRMTSKDTYIIGEDVLPASSLLYEKYKVLNELNNIKVNKKKLDVEQKQHVYLDLFTTRKNVTKDDLATSLNCDVESITGLTDNKKFNSSLSSYIDLKAILGNIVDDYSKNEDLEKIIEYSTIFEDGNIYKEKLSEISWLTDEQIEKLSNIHFKGWGRLSKKLLTQITNENGERIIDTLWNTSNNFIQVISDESIQAKLAEINGEYANKYNLEDILDEAYTSPQNKKAIRQVMKVVEDIEKAMKCEPTSIAIEFTREKRKSKLTNTRYKKISETYEKITDELISEYELGKLQSELDSKVNNMRDRYYLYFMQLGRDMYTGEKMNIDELHQKYDIDHILPQSFIKDDSLNNRVLTSKSVNIKEKSDKTAADLYAAKMGDFWRKLRKQGLMTEQKYKNLLTRTDSINKYTKQSFIKRQLVETSQVVKLAANILQDKYRNTKIIEIRARLNSDLRKKYELIKNREVNDYHHAIDGYLTTFVGQYLYKVYPKLRSYFVYDDFKKLDSNYLKHMDKFNFIWKLEDKKAEDVYDKVNDEFVLNVPEMKEYIRKIYNYKYMLVSKEVTTKNGAFYDQTKYNAKTINLIPIKKDKPTNIYGGYKGKVSSYMMLVKIQKKKEVIYKFVGVPRLWTDELDRLIDTDEKKALLKK

SEQ ID NO: 38 - protein, 1064 aa, Rhodopseudomonas palustris
MSECVTRRILGIDLGIASCGWGVIEVGEASGSIIASGVRCFDAPLIDKTGEPKSATRRTARGQRRIIRRRRQRMNAVRRLLAEFGVLTGRSPDALHQALLRLSQSVAGSQVTPWTLRAAAHERKLTNDELAVVLGHIARHRGFRSNSKNDGGANAADETSKMKKAMETTREGLARYHSFGAMIASDPKFADRKRNRDKDYSHTAKRSDLEDEVRTIFRSQTRFGSLVASEKLSQAFADAAFFQRPLQDSEDMVGSCPFEPGQKRTARRAPSFELFRFLSRLANLKLTVGRAPERRLTPDEIALAAKGFGETKKSITFKSLREALDLDPNARFSGVAKEKESTLDVAARTGGAAYGTKTLKDALGDAPWRSLSRMPEKLDRIAEILSFREDMKAIRNGLEEVGLDGLVVDALMQATANGDFKDFTRAAHISALAARNIIPGLREGLVYSDACTRVGYDHAARPAVPLSQIGSPVTRKALSEALKQVRAVAREYGPIDYFHIELARSIGKSAEERKKLTDGIEARNVEKEKRRKEAAEHLGRAPSDDELLRYELAKEQNFKCIYSGDPIDPAGISANDTRYQVDHILPWSRFGDDSYVNKTLCTARSNQNKRGRTPFEWFDADKTEAEWMEYSARVEDLKEVKGRKKRNYSIKDAASVEDKFKARNLTDTQWATRLLADELKRMFPPRECERVVTVRADGGNDGLSIVEERRVFTRPGAITSKLRRAWGLEGLKKQDGKRVEDDRHHAVDALVLAATTESLLNRLTVEVQQREREGRQDDIFHCSQPWPGFRVDVQRTVYGSETMPGIFVSRAERRRARGKAHDATVKQIRDIDGERIVFERKPIEKLTDKDLERIPVPEPYGKAADPKKLRDELVENLRAWIAAGKPKDKPPRSPKGDIIRKVRIETKDKVAVEINGGTVDRGDMARVDVFRKKNKKGVWEFYVIPIYPHQIVASALPPNRAVIAYKAESEWTAIDGCFEFAWSLNPMSYLELVKSNGELIEGYFRSMDRTTGAINLSPMSTNSETIRSIGVKTLSSFRKFTVDRLGRKFEIPREVRTWRGEACT

SEQ ID NO: 39 - protein, 1166 aa, Nitrobacter hamburgensis
MHVEIDFPHFSRGDSHLAMNKNEILRGSSVLYRLGLDLGSNSLGWFVTHLEKRGDRHEPVALGPGGVRIFPDGRDPQSGTSNAVDRRMARGARKRRDRFVERRKELIAALIKYNLLPDDARERRALEVLDPYALRKTALTDTLPAHHVGRALFHLNQRRGFQSNRKTDSKQSEDGAIKQAASRLATDKGNETLGVFFADMHLRKSYEDRQTAIRAELVRLGKDHLTGNARKKIWAKVRKRLFGDEVLPRADAPHGVRARATITGTKASYDYYPTRDMLRDEFNAIWAGQSAHHATITDEARTEIEHIIFYQRPLKPAIVGKCTLDPATRPFKEDPEGYRAPWSHPLAQRFRILSEARNLEIRDTGKGSRRLTKEQSDLVVAALLANREVKFDKLRTLLKLPAEARFNLESDRRAALDGDQTAARLSDKKGFNKAWRGFPPERQIAIVARLEETEDENELIAWLEKECALDGAAAARVANTTLPDGHCRLGLRAIKKIVPIMQDGLDEDGVAGAGYHIAAKRAGYDHAKLPTGEQLGRLPYYGQWLQDAVVGSGDARDQKEKQYGQFPNPTVHIGLGQLRRVVNDLIDKYGPPTEISIEFTRALKLSEQQKAERQREQRRNQDKNKARAEELAKFGRPANPRNLLKMRLWEELAHDPLDRKCVYTGEQISIERLLSDEVDIDHILPVAMTLDDSPANKIICMRYANRHKRKQTPSEAFGSSPTLQGHRYNWDDIAARATGLPRNKRWRFDANAREEFDKRGGFLARQLNETGWLARLAKQYLGAVTDPNQIWVVPGRLTSMLRGKWGLNGLLPSDNYAGVQDKAEEFLASTDDMEFSGVKNRADHRHHAIDGLVTALTDRSLLWKMANAYDEEHEKFVIEPPWPTMRDDLKAALEKMVVSHKPDHGIEGKLHEDSAYGFVKPLDATGLKEEEAGNLVYRKAIESLNENEVDRIRDIQLRTIVRDHVNVEKTKGVALADALRQLQAPSDDYPQFKHGLRHVRILKKEKGDYLVPIANRASGVAYKAYSAGENFCVEVFETAGGKWDGEAVRRFDANKKNAGPKIAHAPQWRDANEGAKLVMRIHKGDLIRLDHEGRARIMVVHRLDAAAGRFKLADHNETGNLDKRHATNNDIDPFRWLMASYNTLKKLAAVPVRVDELGRVWRVMPN

SEQ ID NO: 40 - protein, 641 aa, Nitrobacter hamburgensis
MHKRNSRSYRLGLDLGSNSLGWFVTHLEKRGDRYEPVALDPGGVRIFPDGRDPQSGMSNAVDRRMARGARKRRDRFVDPYALRKAALTNALPAHRVGRAIFHLNQRRGFQSNRKTDRKQSEDGAIKQAASKLKARMHEEAAPTLGAFFADMHLRKSYDDQQTAIRAELVRLGKDHLTGNARKKVWAKVRKRLFGDEVLRPKDTSDGARARATTTGTKASYDFYPTRAMLLDEFNAIWAAQREHHLAMTDEAKAEIEHIIFYHRPLKPAIVGKCTLDPATRPFKEDPEGYRAPWSHPLAQRFRILSEARNLEIRETGKTSRRLTKDQSDLVVAALLANREVKFDKLRTLLKLPAEARFNLESDRRSTATRPPHGCRTRRASIRRGAGFLRNGRSRSSPDWKKPKTKTNCSHGSKWNAHLTAQRPRASPIRRCRTAIAGSACAQSKRSCRSCRTSSMRMALRAPAITSWPSVPATTIPVDTFQQGGNAFGRILSVVTIELFAITDRVDPVQEQDARCFALRIAECRSDGLQHFAEVSLGLPPRNAAQDQRHSAGLCQSSCVGRFVPGTPCRRTPRSTSLHGKEPSAHAFGSTARSRPQLPASPRPCMSFRDGTSSSPARMPETLDRCAISRSNRSSVCRAERL

SEQ ID NO: 41 - protein, 1368 aa, Streptococcus pyogenes
MDKKYSIGLDIGTNSVGWAVITDDYKVPSKKFKVLGNTDRHSIKKNLIGALLFDSGEIAEATRLKRTARRRYTRRKNRICYLQEIFSNEMAKVDDSFFHRLEESFLVEEDKKHERHPIFGNIVDEVAYHEKYPTIYHLRKKLVDSTDKADLRLIYLALAHMIKFRGHFLIEGDLNPDNSDVDKLFIQLVQTYNQLFEENPINASGVDAKAILSARLSKSRRLENLIAQLPGEKKNGLFGNLIALSLGLTPNFKSNFDLAEDAKLQLSKDTYDDDLDNLLAQIGDQYADLFLAAKNLSDAILLSDILRLNSEITKAPLSASMIKRYDEHHQDLTLLKALVRQQLPEKYKEIFFDQSKNGYAGYIDGGASQEEFYKFIKPILEKMDGTEELLAKLNREDLLRKQRTFDNGSIPHQIHLGELHAILRRQEDFYPFLKDNREKIEKILTFRIPYYVGPLARGNSRFAWMTRKSEETITPWNFEEVVDKGASAQSFIERMTNFDKNLPNEKVLPKHSLLYEYFTVYNELTKVKYVTEGMRKPAFLSGEQKKAIVDLLFKTNRKVTVKQLKEDYFKKIECFDSVEISGVEDRFNASLGTYHDLLKIIKDKDFLDNEENEDILEDIVLTLTLFEDREMIEERLKTYAHLFDDKVMKQLKRRRYTVWGRLSRKLINGIRDKQSGKTILDFLKSDGFANRNFMQLIHDDSLTFKEDIQKAQVSGQGDSLHEHIANLAGSPAIKKGILQTVKVVDELVKVMGRHKPENIVIEMARENQTTQKGQKNSRERMKRIEEGIKELGSQILKEHPVENTQLQNEKLYLYYLQNGRDMYVDQELDINRLSDYDVDHIVPQSFIKDDSIDNKVLTRSDKNRGKSDNVPSEEVVKKMKNYWRQLLNAKLITQRKFDNLTKAERGGLSELDKAGFIKRQLVETRQITKHVAQILDSRMNTKYDENDKLIREVKVITLKSKLVSDFRKDFQFYKVREINNYHHAHDAYLNAVVGTALIKKYPKLESEFVYGDYKVYDVRKMLAKSEQEIGKATAKYFFYSNIMNFFKTEITLANGEIRKRPLIETNGETGEIVWDKGRDFATVRKVLSMPQVNIVKKTEVQTGGFSKESILPKRNSDKLIARKKDWDPKKYGGFDSPTVAYSVLVVAKVEKGKSKKLKSVKELLGITIMERSSFEKNPIDFLEAKGYKEVRKDLIIKLPKYSLFELENGRKRMLASAGELQKGNELALPSKYVNFLYLASHYEKLKGSPEDNEQKQLFVEQHKHYLDEIIEQISEFSKRVILADANLDKVLSAYNKHRDKPIREQAENIIHLFTLTNLGAPTAFKYFDTTIDRKRYTSTKEVLDATFIHQSITGLYETRIDLSQLGGD

SEQ ID NO: 42 - protein, 1368 aa, Streptococcus pyogenes
MDKKYSIGLDIGTNSVGWAVITDDYKVPSKKFKVLGNTDRHSIKKNLIGALLFDSGETAEATRLKRTARRRYTRRKNRICYLQEIFSNEMAKVDDSFFHRLEESFLVEEDKKHERHPIFGNIVDEVAYHEKYPTIYHLRKKLVDSTDKADLRLIYLALAHMIKFRGHFLIEGDLNPDNSDVDKLFIQLVQTYNQLFEENPINASGVDAKAILSARLSKSRRLENLIAQLPGEKKNGLFGNLIALSLGLTPNFKSNFDLAEDAKLQLSKDTYDDDLDNLLAQIGDQYADLFLAAKNLSDAILLSDILRLNSEITKAPLSASMIKRYDEHHQDLTLLKALVRQQLPEKYKEIFFDQSKNGYAGYIDGGASQEEFYKFIKPILEKMDGTEELLAKLNREDLLRKQRTFDNGSIPHQIHLGELHAILRRQEDFYPFLKDNREKIEKILTFRIPYYVGPLARGNSRFAWMTRKSEETITPWNFEEVVDKGASAQSFIERMTNFDKNLPNEKVLPKHSLLYEYFTVYNELTKVKYVTEGMRKPAFLSGEQKKAIVDLLFKTNRKVTVKQLKEDYFKKIECFDSVEISGVEDRFNASLGTYHDLLKIIKDKDFLDNEENEDILEDIVLTLTLFEDREMIEERLKTYAHLFDDKVMKQLKRRRYTGWGRLSRKLINGIRDKQSGKTILDFLKSDGFANRNFMQLIHDDSLTFKEDIQKAQVSGQGDSLHEHIANLAGSPAIKKGILQTVKVVDELVKVMGRHKPENIVIEMARENQTTQKGQKNSRERMKRIEEGIKELGSQILKEHPVENTQLQNEKLYLYYLQNGRDMYVDQELDINRLSDYDVDHIVPQSFIKDDSIDNKVLTRSDKNRGKSDNVPSEEVVKKMKNYWRQLLNAKLITQRKFDNLTKAERGGLSELDKAGFIKRQLVETRQITKHVAQILDSRMNTKYDENDKLIREVKVITLKSKLVSDFRKDFQFYKVREINNYHHAHDAYLNAVVGTALIKKYPKLESEFVYGDYKVYDVRKMIAKSEQEIGKATAKYFFYSNIMNFFKTEITLANGEIRKRPLIETNGETGEIVWDKGRDFATVRKVLSMPQVNIVKKTEVQTGGFSKESILPKRNSDKLIARKKDWDPKKYGGFDSPTVAYSVLVVAKVEKGKSKKLKSVKELLGLTIMERSSFEKNPIDFLEAKGYKEVKKDLIIKLPKYSLFELENGRKRMLASAGELQKGNELALPSKYVNFLYLASHYEKLKGSPEDNEQKQLFVEQHKHYLDEIIEQISEFSKRVILADANLDKVLSAYNKHRDKPIREQAENIIHLFTLTNLGAPAAFKYFDTTIDRKRYTSTKEVLDATLIHQSITGLYETRIDLSQLGGD

SEQ ID NO: 43 - protein, 1368 aa, Streptococcus pyogenes
MDKKYSIGLDIGTNSVGWAVITDDYKVPSKKFKVLGNTDRHSIKKNLIGALLFDSGEIAEATRLKRTARRRYTRRKNRICYLQEIFSNEMAKVDDSFFHRLEESFLVEEDKKHERHPIFGNIVDEVAYHEKYPTIYHLRKKLVDSTDKADLRLIYLALAHMIKFRGHFLIEGDLNPDNSDVDKLFIQLVQTYNQLFEENPINASGVDAKAILSARLSKSRRLENLIAQLPGEKKNGLFGNLIALSLGLTPNFKSNFDLAEDAKLQLSKDTYDDDLDNLLAQIGDQYADLFLAAKNLSDAILLSDILRLNSEITKAPLSASMIKRYDEHHQDLTLLKALVRQQLPEKYKEIFFDQSKNGYAGYIDGGASQEEFYKFIKPILEKMDGTEELLAKLNREDLLRKQRTFDNGSIPHQIHLGELHAILRRQEDFYPFLKDNREKIEKILTFRIPYYVGPLARGNSRFAWMTRKSEETITPWNFEEVVDKGASAQSFIERMTNFDKNLPNEKVLPKHSLLYEYFTVYNELTKVKYVTEGMRKPAFLSGEQKKAIVDLLFKTNRKVTVKQLKEDYFKKIECFDSVEISGVEDRFNASLGTYHDLLKIIKDKDFLDNEENEDILEDIVLTLTLFEDREMIEERLKTYAHLFDDKVMKQLKRRRYTGWGRLSRKLINGIRDKQSGKTILDFLKSDGFANRNFMQLIHDDSLTFKEDIQKAQVSGQGDSLHEHIANLAGSPAIKKGILQTVKVVDELVKVMGRHKPENIVIEMARENQTTQKGQKNSRERMKRIEEGIKELGSQILKEHPVENTQLQNEKLYLYYLQNGRDMYVDQELDINRLSDYDVDHIVPQSFIKDDSIDNKVLTRSDKNRGKSDNVPSEEVVKKMKNYWRQLLNAKLITQRKFDNLTKAERGGLSELDKAGFIKRQLVETRQITKHVAQILDSRMNTKYDENDKLIREVKVITLKSKLVSDFRKDFQFYKVREINNYHHAHDAYLNAVVGTALIKKYPKLESEFVYGDYKVYDVRKMLAKSEQEIGKATAKYFFYSNIMNFFKTEITLANGEIRKRPLIETNGETGEIVWDKGRDFATVRKVLSMPQVNIVKKTEVQTGGFSKESILPKRNSDKLIARKKDWDPKKYGGFDSPTVAYSVLVVAKVEKGKSKKLKSVKELLGITIMERSSFEKNPIDFLEAKGYKEVRKDLIIKLPKYSLFELENGRKRMLASAGELQKGNELALPSKYVNFLYLASHYEKLKGSPEDNEQKQLFVEQHKHYLDEIIEQISEFSKRVILADANLDKVLSAYNKHRDKPIREQAENIIHLFTLTNLGAPTAFKYFDTTIDRKRYTSTKEVLDATFIHQSITGLYETRIDLSQLGGD

SEQ ID NO: 44 - protein, 1371 aa, Streptococcus pyogenes
MDKKYSIGLDIGTNSVGWAVITDDYKVPSKKFKVLGNTDRHSIKKNLIGALLFDSGETAEATRLKRTARRRYTRRKNRICYLQEIFSNEMAKVDDSFFHRLEESFLVEEDKKHERHPIFGNIVDEVAYHEKYPTIYHLRKKLADSTDKADLRLIYLALAHMIKFRGHFLIEGDLNPDNSDVDKLFIQLVQTYNQLFEENPINASRVDAKAILSARLSKSRRLENLIAQLPGEKKNGLFGNLIALSLGLTPNFKSNFDLAEDAKLQLSKDTYDDDLDNLLAQIGDQYADLFLAAKNLSDATLLSDILRVNSEITKAPLSASMIKRYDEHHQDLTLLKALVRQQLPEKYKEIFFDQSKNGYAGYIDGGASQEEFYKFIKPILEKMDGTEELLAKLNREDLLRKQRTFDNGSIPHQIHLGELHAILRRQEDFYPFLKDNREKIEKILTFRIPYYVGPLARGNSRFAWMTRKSEETITPWNFEEVVDKGASAQSFIERMTNFDKNLPNEKVLPKHSLLYEYFTVYNELTKVKYVTEGMRKPAFLSGEQKKAIVDLLFKTNRKVTVKQLKEDYFKKIECFDSVEISGVEDRFNASLGTYHDLLKIIKDKDFLDNEENEDILEDIVLTLTLFEDKEMIEERLKTYAHLFDDKVMKQLKRRHYTGWGRLSRKLINGIRDKQSGKTILDFLKSDGFANRNFIQLIHDDSLTFKEAIQKAQVSGQGHSLHEQIANLAGSPAIKKGILQSVKVVDELVKVMGHKPENIVIEMARENQTTQKGQKNSRERMKRIEEGIKELGSQILKEHPVENTQLQNEKLYLYYLQNGRDMYVDQELDINRLSDYDVDHIVPQSFIKDDSIDNKVLTRSDKNRGKSDDVPSEEVVKKMKNYWRQLLNAKLITQRKFDNLTKAERGGLSELDKAGFIKRQLVETRQITKHVAQILDSRMNTKYDENDKLIREVKVITLKSKLVSDFRKDFQFYKVREINNYHHAHDAYLNAVVGTALIKKYPKLESEFVYGDYKVYDVRKMIAKSEQEIGKATAKRFFYSNIMNFFKTEITLANGEIRKRPLIETNEETGEIVWDKGRDFATVRKVLSMPQVNIVKKTEVQTGALTNESIYARGSFDKLISRKHRFESSKYGGFGSPTVTYSVLVVAKSKVQDGKVKKIKTGKELIGITLLDKLVFEKNPLKFIEDKGYGNVQIDKCIKLPKYSLFEFENGTRRMLASVMANNNSRGDLQKANEMFLPAKLVTLLYHAHKIESSKELEHEAYILDHYNDLYQLLSYIERFASLYVDVEKNISKVKELFSNIESYSISEICSSVINLLTLTASGAPADFKFLGTTIPRKRYGSPQSILSSTLIHQSITGLYETRIDLSQLGSD

SEQ ID NO: 45 - protein, 1121 aa, Streptococcus thermophilus
MSDLVLGLDIGIGSVGVGILNKVTGEIIHKNSRIFPAAQAENNLVRRTNRQGRRLARRKKHRRVRLNRLFEESGLITDFTKISINLNPYQLRVKGLTDELSNEELFIALKNMVKHRGISYLDDASDDGNSSVGDYAQIVKENSKQLETKTPGQIQLERYQTYGQLRGDFTVEKDGKKHRLINVFPTSAYRSEALRILQTQQEFNPQITDEFINRYLEILTGKRKYYHGPGNEKSRTDYGRYRTSGETLDNIFGILIGKCTFYPDEFRAAKASYTAQEFNLLNDLNNLTVPTETKKLSKEQKNQIINYVKNEKAMGPAKLFKYIAKLLSCDVADIKGYRIDKSGKAEIHTFEAYRKMKTLETLDIEQMDRETLDKLAYVLTLNTEREGIQEALEHEFADGSFSQKQVDELVQFRKANSSIFGKGWHNFSVKLMMELIPELYETSEEQMTILTRLGKQKTTSSSNKTKYIDEKLLTEEIYNPVVAKSVRQAIKIVNAAIKEYGDFDNIVIEMARETNEDDEKKAIQKIQKANKDEKDAAMLKAANQYNGKAELPHSVFHGHKQLATKIRLWHQQGERCLYTGKTISIHDLINNSNQFEVDHILPLSITFDDSLANKVLVYATANQEKGQRTPYQALDSMDDAWSFRELKAFVRESKTLSNKKKEYLLTEEDISKFDVRKKFIERNLVDTRYASRVVLNALQEHFRAHKIDTKVSVVRGQFTSQLRRHWGIEKTRDTYHHHAVDALIIAASSQLNLWKKQKNTLVSYSEDQLLDIETGELISDDEYKESVFKAPYQHFVDTLKSKEFEDSILFSYQVDSKFNRKISDATIYATRQAKVGKDKADETYVLGKIKDIYTQDGYDAFMKIYKKDKSKFLMYRHDPQTFEKVIEPILENYPNKQINEKGKEVPCNPFLKYKEEHGYIRKYSKKGNGPEIKSLKYYDSKLGNHIDITPKDSNNKVVLQSVSPWRADVYFNKTTGKYEILGLKYADLQFEKGTGTYKISQEKYNDIKKKEGVDSDSEFKFTLYKNDLLLVKDTETKEQQLFRFLSRTMPKQKHYVELKPYDKQKFEGGEALIKVLGNVANSGQCKKGLGKSNISIYKVRTDVLGNQHIIKNEGDKPKLDF

SEQ ID NO: 46 - protein, 1388 aa, Streptococcus thermophilus
MTKPYSIGLDIGTNSVGWAVTTDNYKVPSKKMKVLGNTSKKYIKKNLLGVLLFDSGITAEGRRLKRTARRRYTRRRNRILYLQEIFSTEMATLDDAFFQRLDDSFLVPDDKRDSKYPIFGNLVEEKAYHDEFPTIYHLRKYLADSTKKADLRLVYLALAHMIKYRGHFLIEGEFNSKNNDIQKNFQDFLDTYNAIFESDLSLENSKQLEEIVKDKISKLEKKDRILKLFPGEKNSGIFSEFLKLIVGNQADFRKCFNLDEKASLHFSKESYDEDLETLLGYIGDDYSDVFLKAKKLYDAILLSGFLTVTDNETEAPLSSAMIKRYNEHKEDLALLKEYIRNISLKTYNEVFKDDTKNGYAGYIDGKTNQEDFYVYLKKLLAEFEGADYFLEKIDREDFLRKQRTFDNGSIPYQIHLQEMRAILDKQAKFYPFLAKNKERIEKILTFRIPYYVGPLARGNSDFAWSIRKRNEKITPWNFEDVIDKESSAEAFINRMTSFDLYLPEEKVLPKHSLLYETFNVYNELTKVRFIAESMRDYQFLDSKQKKDIVRLYFKDKRKVTDKDIIEYLHAIYGYDGIELKGIEKQFNSSLSTYHDLLNIINDKEFLDDSSNEAIIEEIIHTLTIFEDREMIKQRLSKFENIFDKSVLKKLSRRHYTGWGKLSAKLINGIRDEKSGNTILDYLIDDGISNRNFMQLIHDDALSFKKKIQKAQIIGDEDKGNIKEVVKSLPGSPAIKKGILQSIKIVDELVKVMGGRKPESIVVEMARENQYTNQGKSNSQQRLKRLEKSLKELGSKILKENIPAKLSKIDNNALQNDRLYLYYLQNGKDMYTGDDLDIDRLSNYDIDHIIPQAFLKDNSIDNKVLVSSASNRGKSDDVPSLEVVKKRKTFWYQLLKSKLISQRKFDNLTKAERGGLSPEDKAGFIQRQLVETRQITKHVARLLDEKFNNKKDENNRAVRTVKIITLKSTLVSQFRKDFELYKVREINDFHHAHDAYLNAVVASALLKKYPKLEPEFVYGDYPKYNSFRERKSATEKVYFYSNIMNIFKKSISLADGRVIERPLIEVNEETGESVWNKESDLATVRRVLSYPQVNVVKKVEEQNHGLDRGKPKGLFNANLSSKPKPNSNENLVGAKEYLDPKKYGGYAGISNSFTVLVKGTIEKGAKKKITNVLEFQGISILDRINYRKDKLNFLLEKGYKDIELIIELPKYSLFELSDGSRRMLASILSTNNKRGEIHKGNQIFLSQKFVKLLYHAKRISNTINENHRKYVENHKKEFEELFYYILEFNENYVGAKKNGKLLNSAFQSWQNHSIDELCSSFIGPTGSERKGLFELTSRGSAADFEFLGVKIPRYRDYTPSSLLKDATLIHQSVTGLYETRIDLAKLGEG

SEQ ID NO: 47 - protein, 1138 aa, Acidothermus cellulolyticus
MGGSEVGTVPVTWRLGVDVGERSIGLAAVSYEEDKPKEILAAVSWIHDGGVGDERSGASRLALRGMARRARRLRRFRRARLRDLDMLLSELGWTPLPDKNVSPVDAWLARKRLAEEYVVDETERRRLLGYAVSHMARHRGWRNPWTTIKDLKNLPQPSDSWERTRESLEARYSVSLEPGTVGQWAGYLLQRAPGIRLNPTQQSAGRRAELSNATAFETRLRQEDVLWELRCIADVQGLPEDVVSNVIDAVFCQKRPSVPAERIGRDPLDPSQLRASRACLEFQEYRIVAAVANLRIRDGSGSRPLSLEERNAVIEALLAQTERSLTWSDIALEILKLPNESDLTSVPEEDGPSSLAYSQFAPFDETSARIAEFIAKNRRKIPTFAQWWQEQDRTSRSDLVAALADNSIAGEEEQELLVHLPDAELEALEGLALPSGRVAYSRLTLSGLTRVMRDDGVDVHNARKTCFGVDDNWRPPLPALHEATGHPVVDRNLAILRKFLSSATMRWGPPQSIVVELARGASESRERQAEEEAARRAHRKANDRIRAELRASGLSDPSPADLVRARLLELYDCHCMYCGAPISWENSELDHIVPRTDGGSNRHENLAITCGACNKEKGRRPFASWAETSNRVQLRDVIDRVQKLKYSGNMYWTRDEFSRYKKSVVARLKRRTSDPEVIQSIESTGYAAVALRDRLLSYGEKNGVAQVAVFRGGVTAEARRWLDISIERLFSRVAIFAQSTSTKRLDRRHHAVDAVVLTTLTPGVAKTLADARSRRVSAEFWRRPSDVNRHSTEEPQSPAYRQWKESCSGLGDLLISTAARDSIAVAAPLRLRPTGALHEETLRAFSEHTVGAAWKGAELRRIVEPEVYAAFLALTDPGGRFLKVSPSEDVLPADENRHIVLSDRVLGPRDRVKLFPDDRGSIRVRGGAAYIASFHHARVFRWGSSHSPSFALLRVSLADLAVAGLLRDGVDVFTAELPPWTPAWRYASIALVKAVESGDAKQVGWLVPGDELDFGPEGVTTAAGDLSMFLKYFPERHWVVTGFEDDKRINLKPAFLSAEQAEVLRTERSDRPDTLTEAGEILAQFFPRCWRATVAKVLCHPGLTVIRRTALGQPRWRRGHLPYSWRPWSADPWSGGTP

SEQ ID NO: 48 - protein, 1629 aa, Francisella novicida
MNFKILPIAIDLGVKNTGVFSAFYQKGTSLERLDNKNGKVYELSKDSYTLLMNNRTARRHQRRGIDRKQLVKRLFKLIWTEQLNLEWDKDTQQAISFLFNRRGFSFITDGYSPEYLNIVPEQVKAILMDIFDDYNGEDDLDSYLKLATEQESKISEIYNKLMQKILEFKLMKLCTDIKDDKVSTKTLKEITSYEFELLADYLANYSESLKTQKFSYTDKQGNLKELSYYHHDKYNIQEFLKRHATINDRILDTLLTDDLDIWNFNFEKFDFDKNEEKLQNQEDKDHIQAHLHHFVFAVNKIKSEMASGGRHRSQYFQEITNVLDENNHQEGYLKNFCENLHNKKYSNLSVKNLVNLIGNLSNLELKPLRKYFNDKIHAKADHWDEQKFTETYCHWILGEWRVGVKDQDKKDGAKYSYKDLCNELKQKVTKAGLVDFLLELDPCRTIPPYLDNNNRKPPKCQSLILNPKFLDNQYPNWQQYLQELKKLQSIQNYLDSFETDLKVLKSSKDQPYFVEYKSSNQQIASGQRDYKDLDARILQFIFDRVKASDELLLNEIYFQAKKLKQKASSELEKLESSKKLDEVIANSQLSQILKSQHTNGIFEQGTFLHLVCKYYKQRQRARDSRLYIMPEYRYDKKLHKYNNTGRFDDDNQLLTYCNHKPRQKRYQLLNDLAGVLQVSPNFLKDKIGSDDDLFISKWLVEHIRGFKKACEDSLKIQKDNRGLLNHKINIARNTKGKCEKEIFNLICKIEGSEDKKGNYKHGLAYELGVLLFGEPNEASKPEFDRKIKKFNSIYSFAQIQQIAFAERKGNANTCAVCSADNAHRMQQIKITEPVEDNKDKIILSAKAQRLPAIPTRIVDGAVKKMATILAKNIVDDNWQNIKQVLSAKHQLHIPIITESNAFEFEPALADVKGKSLKDRRKKALERISPENIFKDKNNRIKEFAKGISAYSGANLTDGDFDGAKEELDHIIPRSHKKYGTLNDEANLICVTRGDNKNKGNRIFCLRDLADNYKLKQFETTDDLEIEKKIADTIWDANKKDFKFGNYRSFINLTPQEQKAFRHALFLADENPIKQAVIRAINNRNRTFVNGTQRYFAEVLANNIYLRAKKENLNTDKISFDYFGIPTIGNGRGIAEIRQLYEKVDSDIQAYAKGDKPQASYSHLIDAMLAFCIAADEHRNDGSIGLEIDKNYSLYPLDKNTGEVFTKDIFSQIKITDNEFSDKKLVRKKAIEGFNTHRQMTRDGIYAENYLPILIHKELNEVRKGYTWKNSEEIKIFKGKKYDIQQLNNLVYCLKFVDKPISIDIQISTLEELRNILTTNNIAATAEYYYINLKTQKLHEYYIENYNTALGYKKYSKEMEFLRSLAYRSERVKIKSIDDVKQVLDKDSNFIIGKITLPFKKEWQRLYREWQNTTIKDDYEFLKSFFNVKSITKLHKKVRKDFSLPISTNEGKFLVKRKTWDNNFIYQILNDSDSRADGTKPFIPAFDISKNEIVEAIIDSFTSKNIFWLPKNIELQKVDNKNIFAIDTSKWFEVETPSDLRDIGIATIQYKIDNNSRPKVRVKLDYVIDDDSKINYFMNHSLLKSRYPDKVLEILKQSTIIEFESSGFNKTIKEMLGMKLAGIYNETSNN

SEQ ID NO: 49 - protein, 1068 aa, Verminephrobacter eiseniae
MNKAVAYRLALDLGSTSLGWAIFRLNEAREPTAIIRAGVRIFSDGRNANSEPLAVHRRVARAMRRRRDRLLKRKKRMHDQLVQHGFFPAEVAERKELERLNPYQLRAKGLHEALTPGEFARALFHINQRRGFKSNRKTDRKDNDSGALKQAISELRKRIQDSDCATAGEWFWKERMQQKPEGVRGQWVRARYRKTPSTTDEGKKRIGYDLYVDRAMVEQEFDALWAAQAALQPGLFTEAARAELKDTLLYQRDLRPVKPGRCTLLPAEERAPLALPSTQRFRILQEVNNLRLLDEALREVPLNLAQRDAVVSALEGKKELSFAAIRKLLTLSGKFNLEDEKRAELKGNATSVILARKDLFGDAWAGFDAAVQDEIVWRLVSQESEGALIAWLQQHTGVDGVCAEAIVNTRLPDGYGRLSRKALERIVPALQREVCTYDKAVQAAGFAHHSDLGFDFDYAEDEVQQVGEHTIASTGEVQAQYAFKQLPYYGKALQRHVAFGSGDAKDHEEKCYGKIANPTVHIGLNQVRTVVNALIRRYGHPTEVVVELARDLKQSREQKQQTQREQADNQKRNEDIRKRIAPILETSPERVRDRDIKKWILWEELNKKDIADRHCPYSGERISATMLLSEAVEIEHILPFSRTLDDSLNNRTVAMRRANRIKGDRTPWEARADFEAQGWRYEAILQRAEGMPPRKRYRFAEDGYQRWLGKDRNFLARALNDTSYLSRLAANYLRLVCPQGVRVIPGQMTDKLRGKFGLNSVLGLDGKKNRNDHRHHAVDACVIGVTDQGLMQRFANASKQARENGLTRLVQDMLLPWWPSYYDHVERAVRHIRVSHRPDHGFEGAMMKGTAHGIREDGIREDGRIKQRPKAKGSADHKTITLIPIDEPRQLARHGVDAEGKPLPYKGYASGSNYCIEITKNGKGKWEGQVISTFDAYRIKAAADAAARAGQVISTVEADSIVRKSGWERLRGAQSQNGQPLVMRLVIGDSVRMEVDGRDEVMRVVKMSGKEMVFAPVREANVDKRNNMPDEQDPFTYTYKRADQLRKAKARQVTISPIGELRDPGFKG

SEQ ID NO: 50 - protein, 1125 aa, Francisella tularensis
MNVKILPIAIDLDVKNTGVFSAFYQKGTSLEKLDNKNGKVYELSKDSYTLLMNNRTARRHQRRGIDRKQLVKRLFKLVWTEQLNLEWDKDTQQAISFLFNRRGFSFITDGYSTEYLNIVPEQVKAILMDIFDDYNGEDDLDSYLKLATEQESKISEIYNKLMQKILEFKLRKLCTDIKDDKVSTKTLKEITSYEFELLADYLANYSESLKIQKFSYTDKQGNLKELSYYHHDKYNIQEFLKRHATINDEILDTLLTDDFDIWNFNFEKFDFDKNEEKLQNQEDKDHTQAHLHHFVFAVNKIKSEMASGGRHRSQYFQEITNVLDENNHQEGYLKNFCENLHNKKYSNLSVKNLVNLVGNLSNLELKPLRKYFNDKIHAKADHWDEQKFTETYCHWILGEWRVGVKDQDKKDGAKYSYKDLCNELKQKVTKAGLIDFLLELDPCRTIPPYLDNNNRKPPKCQSLILNPKFLDNQYPNWQQYLQELKKLQSIQDYLDSFETDLKDLKSSKDQPYFVEYKSSNQQMASGQRDYKDLDARILQFIFDRVKASDELLLNEIYFQAKKLKQKASSELEKLESSKKLDEVIANSQLSQILKSQHTNGIFEQGTFLHLVCKYYKQRQRARDSRLYIMPEYRYDKKLDKYNNTGRFDDNNQLLTYCNHKPRQKRYQLLNDLAGVLQVSRNQLLSSVEEWFQQAQRVGEISKSQDEQIFEWLKSFKIASYCKAAVEMQKQYRGTLKNAIQTAIFRQSENINKNKNKNTGNQQQALSENSKDVKSLTADEKKLLKLIENIAKASQKIGESLGLNDKQIKKFNSIYSFAQIQQIAFAERKGNANTCAVCSADNAHRMQQIKITELVEDNKDNIILSAKAQRLPAIPTRIVDGAVKKMATILAKNIVDDNWQNIKQVLSAKHQLHIPIITESNAFEFEPALADVKGKSLKDRRKKALERISPENIFKDKNNRIKEFAKGISAYSGANLTDGDFDGAKEELDHIIPRSHKKYGTLNDEANLICVTRDDNKNIFAIDTSKWFEIETPSDLRDIGVATIQYKIDNNSRPKVRVKLDYVIDDDSKINYFMNHSLLKSRYPDKVLEILKQSTIIEFESSGFNKTIKEMLGMTLAGIYNETSNN

SEQ ID NO: 51 - protein, 1064 aa, Bradyrhizobium sp.
MKRTSLRAYRLGVDLGANSLGWFVVWLDDHGQPEGLGPGGVRIFPDGRNPQSKQSNAAGRRLARSARRRRDRYLQRRGKLMGLLVKHGLMPADEPARKRLECLDPYGLRAKALDEVLPLHHVGRALFHLNQRRGLFANRAIEQGDKDASAIKAAAGRLQTSMQACGARTLGEFLNRRHQLRATVRARSPVGGDVQARYEFYPTRAMVDAEFEAIWAAQAPHHPTMTAEAHDTIREAIFSQRAMKRPSIGKCSLDPATSQDDVDGFRCAWSHPLAQRFRIWQDVRNLAVVETGPTSSRLGKEDQDKVARALLQTDQLSFDEIRGLLGLPSDARFNLESDRRDHLKGDATGAILSARRHFGPAWHDRSLDRQIDIVALLESALDEAAIIASLGTTHSLDEAAAQRALSALLPDGYCRLGLRAIKRVLPLMEAGRTYAEAASAAGYDHALLPGGKLSPTGYLPYYGQWLQNDVVGSDDERDTNERRWGRLPNPTVHIGIGQLRRVVNELIRWHGPPAEITVELTRDLKLSPRRLAELEREQAENQRKNDKRTSLLRKLGLPASTHNLLKLRLWDEQGDVASECPYTGEAIGLERLVSDDVDIDHLIPFSISWDDSAANKVVCMRYANREKGNRTPFEAFGHRQGRPYDWADIAERAARLPRGKRWRFGPGARAQFEELGDFQARLLNETSWLARVAKQYLAAVTHPHRIHVLPGRLTALLRATWELNDLLPGSDDRAAKSRKDHRHHAIDALVAALTDQALLRRMANAHDDTRRKIEVLLPWPTFRIDLETRLKAMLVSHKPDHGLQARLHEDTAYGTVEHPETEDGANLVYRKTFVDISEKEIDRIRDRRLRDLVRAHVAGERQQGKTLKAAVLSFAQRRDIAGHPNGIRHVRLTKSIKPDYLVPIRDKAGRIYKSYNAGENAFVDILQAESGRWIARATTVFQANQANESHDAPAAQPIMRVFKGDMLRIDHAGAEKFVKIVRLSPSNNLLYLVEHHQAGVFQTRHDDPEDSFRWLFASFDKLREWNAELVRIDTLGQPWRRKRGLETGSEDATRIGWTRPKKWP

SEQ ID NO: 52 - protein, 1354 aa, Flavobacterium psychrophilum
MKKILGLDLGTNSIGWAFINEAENEIEVSSIVNTGVRIVPLTTDEESDFKKGNTISINADRTLKRGARRGLQRFKQRREALLETFNRIKFIATDFVYAETGAATTFSSYQLRAKSAVEAVTKEELVKVLLMLNKKRGYKSSRKAKTAEEGDAIDGMKIAKEIFENNLTPGQWVYNSLSKGGKFIPDFYHSDLQKELEKIVRFQNQFHSEQINDKLLADIQGKSRTQTSQHFSKTLNIPLAENKGTREETKLQHYQWRNEALANELDMKILAFIITEINNQINQSSGYLGAISDRSKELYFNQETVGQYQYKQLQENVHAKLKNQVFYRQDYLDEFEKIWETQAKFHSELNEKLKAEIRDITIFYQRKLKSQKHLVSFCEFEKGHKAIPKSSPLFQEFRIWQNLNNVVVKNETTKEVFELSEELKQLIAEELQFKESMTDVQMLTFCELKKGTHTVNFKKIEGNRTNTSIYKAFEKILEVEGYEIDFSKMKPLEIKETVAPIFETLNINTVILDFDPTIQGNDFDKQPYYQLWHLLYSAEDDDKLKETLKTKFGFKENHLPFILNINLQADYGSLSAKAIKKILPHLMDGHIYDKACLMVGYNHSSSLTTAQNNDRVLKDTLELLKKNSLRNPVVEKILNQMINVINAIMKDPAMGKPDEIRVELARELKANNEQRKKATSDINTATTEHERIRKLLHSEFNIPRVTRNDIIRYKLWLETGGISLYTGNPIKASDLFSKNYDIEHIIPKSRLFDDSFSNKTLCERQLNIDKSNKTAYSFLQEKLSENDFAAYENRVKDLFKTGKIKSYTKYKKLLMADNEIPEGFIDRQLRETQYIAKKAKEILLEVSRNVTATIGSVTDKLRQDWELVDVMKELNWEKYDKLGLTHIEEGKNGERLSKIKDWTKRNDHRHHAMDAITVAFTKPAYIQYLNNLNAKTQGENKANSIIGIENKHLYRDKNNKLRFISPMKNFREEAKKQLESILISYKAKNKVVTKNKNTTKKSGGTNQKIQLTPRGRLHKETVYGKLQQYATKEEKVNASFTEDYIQKVAKKEYREALLKRLEENDNDPKKAFTGKNALNKTPIYISLKDNIIVPEKVKTVWLETDYTIRKDITPDLKIDKVIDVGIKRILQNRLNEFNGDPKKAFVNLGESPIWLNKEKGIAIKRVTISGVSNAQALHTKKDHLGNEILDKNGNPIPVDFISTGNNHHVAIYRDEKGNLQEEVVSFYDAVIRRNLGLSVINKNHEKGWEFLFSMKQNEFFIFPSDGFNPHEIDLLNPNNYHLISPNIFRVQKISTKNYMFNHHLETKAVDGEMLKSKKELSKTSYHFIQTPTNLNGIIKVRINHLGKIVHLGEY

SEQ ID NO: 53 - protein, 1062 aa, Actinobacillus succinogenes
MNLNYILGLDLGIASVGWAVVEIDEQENPQRLIDVGVRTFDRAEVLKTGESLALARRLARSSRRLVKRRAERIKKAKRLLKAENLLLSADEILPNEAWQLRVKGLDQKLERQEWAAVLLHLLKHRGYLSQRKNESKSENKELGALLSGVAINHQILQSAEYRTPAEIAVNKFQAEEGHIRNQRGAYTHTFSRLDLLAEMELLFQRQATLGNPHTSTKLLENLTALLMWQKPALAGEAILKMLGKCTFEPTEYKAAKNSYSAERFVWLTKLNNLRILEQGAERALTDNERFALLDQPYEKAKLTYAQVRTLLGLSDEAIFKGLRYQGEDKKAVETKTTLMEVKAYHQIRKALEGLDLKAEWNELKNNPALLDEIGTAFSLYKTDDDIHRYLDGKLSESVLNALLENLNFDKFIQLSLKALQQILPLMLQGQRYDEAVSAIYGDHYGKKSDEIDRLLPNIPTDEIRNPVVLRTLTQARKVINAVVRLYGSPARIHIETGREVGKSYQDRKKLEKQQEENRKQRENAVKKFKEYFPNFVGEPKGKDILKMRLYELQQAKCLYSGKSLELYRLLEKGYVEVDHALPFSRTWDDSFNNKVLVLANENQNKGNATPYEWLDGKNNSEGWQHFVARVQTSGFSYAKKQRVLIQELDEKSFIERNLNDTRYVARFLCNHIADNMLLTGKGKRKVFASNGQITALLRGCWGLQKVRENNDRHHALDAVVVACSTKSMQDKITKFVKYKEGRLFKDKKDGVYKGERINRETGEIISLHFPTPWKFFKENVEIRIFSENPKLELENRLPDYPQYNHEFVQPLFVSRMPTRKMTGQGHMETVKSAKRLDKGLSVLKVPLTQLKLSDLERMVNREREMALYEALKECLEQFGNDPAKAFAEPFYKKGGALVKAVRVEQTQKSGVLVRNGNGVADNATGSIVRVDVFTKGGKYFLVPIYTWQVAKGILPNKAVIQGKDESEWEEMDENAVFQFSMHKNDLIKVKTKKGEIFGYFNGLDRATGSIEIEEHDLEKSKGKNGSHRGLGVKTAFFLEKYQVDELGKNIRPCRPTKRQHVR

SEQ ID NO: 54 - protein, 1340 aa, Dorea longicatena
MEQEYYLGLDMGTGSVGWAVTDSEYHVLRKHGKALWGVRLFESASTAEERRMFRTSRRRLDRRNWRIEILQEIFAEEISKKDPGFFLRMKESKYYPEDKRDINGNCPELPYALFVDDDFTDKDYHKKFPTIYHLRKMLMNTEETPDIRLVYLAIHHMMKHRGHFLLSGDINEIKEFGTTFSKLLENIKNEELDWNLELGKEEYAVVESILKDNMLNRSTKKTRLIKALKAKSICEKAVLNLLAGGTVKLSDIFGLEELNETERPKISFADNGYDDYIGEVENELGEQFYIIETAKAVYDWAVLVEILGKYTSISEAKVATYEKHKSDLQFLKKIVRKYLTKEEYKDIFVSTSDKLKNYSAYIGMTKINGKKVDLQSKRCSKEEFYDFIKKNVLKKLEGQPEYEYLKEELERETFLPKQVNRDNGVIPYQIHLYELKKILGNLRDKIDLIKENEDKLVQLFEFRIPYYVGPLNKIDDGKEGKFTWAVRKSNEKIYPWNFENVVDIEASAEKFIRRMTNKCTYLMGEDVLPKDSLLYSKYMVLNELNNVKLDGEKLSVELKQRLYTDVFCKYRKVTVKKIKNYLKCEGIISGNVEITGIDGDFKASLTAYHDFKEILTGTELAKKDKENIITNIVLFGDDKKLLKKRLNRLYPQITPNQLKKICALSYTGWGRFSKKFLEEITAPDPETGEVWNIITALWESNNNLMQLLSNEYRFMEEVETYNMGKQTKTLSYETVENMYVSPSVKRQIWQTLKIVKELEKVMKESPKRVFIEMAREKQESKRTESRKKQLIDLYKACKNEEKDWVKELGDQEEQKLRSDKLYLYYTQKGRCMYSGEVIELKDLWDNTKYDIDHIYPQSKTMDDSLNNRVLVKKKYNATKSDKYPLNENIRHERKGFWKSLLDGGFISKEKYERLIRNTELSPEELAGFIERQIVETRQSTKAVAEILKQVFPESEIVYVKAGTVSRFRKDFELLKVREVNDLHHAKDAYLNIVVGNSYYVKFTKNASWFIKENPGRTYNLKKMFTSGWNIERNGEVAWEVGKKGTIVTVKQIMNKNNILVTRQVHEAKGGLFDQQIMKKGKGQIAIKETDERLASIEKYGGYNKAAGAYFMLVESKDKKGKTIRTIEFIPLYLKNKIESDESIALNFLEKGRGLKEPKILLKKIKIDTLFDVDGFKMWLSGRTGDRLLFKCANQLILDEKIIVTMKKIVKFIQRRQENRELKLSDKDGIDNEVLMEIYNTFVDKLENTVYRIRLSEQAKTLIDKQKEFERLSLEDKSSTLFEILHIFQCQSSAANLKMIGGPGKAGILVMNNNISKCNKISIINQSPTGIFENEIDLLKI

SEQ ID NO: 55 - protein, 984 aa, Campylobacter jejuni
MAKILAFDIGISSIGWAFSENDELKDCGVRIFTKAENPKTGESLALPRRIARSARKRLARRKARLNHLKHLIANEFKLNYEDYQSFDEILAKAYKGSLISPYELRFRALNELLSKQDFARVILHIAKRRGYDDIKNNGDEEKGKILKAIKQNEEKLANYQSVGEYLYKEYFQKFKENSKEFINVRNKKESYERCIAQSFLKDELKLIFKKQREFGFSFSKKFEEEVLSVAFYKRALKDFSHLVGNCSFFTDEKRAPKNSPLAFMFVALTRIINLLNNLKNTLYTKDDLNALLNEVLKNGTLTYKQTKKLLGLSDDYEFKGEKGNYFIEFKKYKEFIKALGEHSLSQDDLNEIAKDITLIKDEIKLKKALAKYDLNENQIDNLSKLEFKDHLNISFKALKLITPLMLEGKKYDEACNELTLKVAINEDKKDFLPAFNETYYKDEVTNPVVLRAIKEYRKVLNALLKKYGKVHKINIELAREVGKNHSQRAKIEKEQNENYKAKKDAELECEKLGLKINSKNILKLRLFKEQKEFCVYSGEKIKLSDLQDEKMLEIDHIYPYSRSFDDSYMNKVLVFTKQNQEKLNQTPFEAFGNDSAKWQKIEVLAKNLPTKKQKRILDKNYKDKEQKDFKDRNLNDTRYIARLVLNYTKDYLDFLPLSDDENTKLNDTQKGSKVHVEAKSGMLTSALRHTWGFSTKDRNNHLHHAIDAVIIAYANNSIVKAFSDFKKEQESNTAELYAKKISELDYKNKRKFFEPFSGFRQKVLDKIDEIFVSKPERKKPSGALHEETFRKEEEFYQSYGGKEGVLKALELGKIRKVNGKIVKNGDMFRVDIFKHKKTNKFYAVPIYTMDFALKVLPNKAVARSKKGEIKDWILMDENYEFCFSLYKDSLILIQTKDMQEPEFVYYNAFTSSTVSLIVSKHDNKFETLSKNQKILFKNANEKEVIAKSIGIQNLKVFEKYIVSALGEVTKAEFRQREEFKNELR

SEQ ID NO: 56 - protein, 1037 aa, Parvibaculum lavamentivorans
MERIFGFDIGTTSIGFSVIDYSSTQSAGNIQRLGVRIFPEARDPDGTPLNQQRRQKRMMRRQLRRRRIRRKALNETLHEAGFLPAYGSADWPVVMADEPYELRRRGLEEGLSAYEFGRAIYHLAQHRHFKGRELEESDTPDPDVDDEKEAANERAATLKALKNEQTTLGAWLARRPPSDRKRGIHAHRNVVAEEFERLWEVQSKFHPALKSEEMRARISDTIFAQRPVFWRKNTLGECRFMPGEPLCPKGSWLSQQRRMLEKLNNLAIAGGNARPLDAEERDAILSKLQQQASMSWPGVRSALKALYKQRGEPGAEKSLKFNLELGGESKLLGNALEAKLADMFGPDWPAHPRKQEIRHAVHERLWAADYGETPDKKRVIILSEKDRKAHREAAANSFVADFGITGEQAAQLQALKLPTGWEPYSIPALNLFLAELEKGERFGALVNGPDWEGWRRTNFPHRNQPTGEILDKLPSPASKEERERISQLRNPTVVRTQNELRKVVNNLIGLYGKPDRIRIEVGRDVGKSKREREEIQSGIRRNEKQRKKATEDLIKNGIANPSRDDVEKWILWKEGQERCPYTGDQIGFNALFREGRYEVEHIWPRSRSFDNSPRNKTLCRKDVNIEKGNRMPFEAFGHDEDRWSAIQIRLQGMVSAKGGTGMSPGKVKRFLAKTMPEDFAARQLNDTRYAAKQILAQLKRLWPDMGPEAPVKVEAVTGQVTAQLRKLWTLNNILADDGEKTRADHRHHAIDALTVACTHPGMTNKLSRYWQLRDDPRAEKPALTPPWDTIRADAEKAVSEIVVSHRVRKKVSGPLHKETTYGDTGTDIKTKSGTYRQFVTRKKIESLSKGELDEIRDPRIKEIVAAHVAGRGGDPKKAFPPYPCVSPGGPEIRKVRLTSKQQLNLMAQTGNGYADLGSNHHIAIYRLPDGKADFEIVSLFDASRRLAQRNPIVQRTRADGASFVMSLAAGEAIMIPEGSKKGIWIVQGVWASGQVVLERDTDADHSTTTRPMPNPILKDDAKKVSIDPIGRVRPSND

SEQ ID NO: 57 - protein, 1107 aa, Eubacterium ventriosum
MGYTVGLDIGVASVGVAVLDENDNIVEAVSNIFDEADTSNNKVRRTLREGRRTKRRQKTRIEDFKQLWETSGYIIPHKLHLNIIELRNKGLTELLSLDELYCVLLSMLKHRGISYLEDADDGEKGNAYKKGLAFNEKQLKEKMPCEIQLERMKKYGKYHGEFIIEINDEKEYQSNVFTTKAYKKELEKIFETQRCNGNKINTKFIKKYMEIYERKREYYIGPGNEKSRTDYGIYTTRTDEEGNFIDEKNIFGKLIGKCSVYPEEYRASSASYTAQEFNLLNDLNNLKINNEKLTEFQKKEIVEIIKDASSVNMRKIIKKVIDEDIEQYSGARIDKKGKEIYHTFEIYRKLKKELKTINVDIDSFTREELDKTMDILTLNTERESIVKAFDEQKFVYEENLIKKLIEFRKNNQRLFSGWHSFSYKAMLQLIPVMYKEPKEQMQLLTEMNVFKSKKEKYVNYKYIPENEVVKEIYNPVVVKSIRTTVKILNALIKKYGYPESVVIEMPRDKNSDDEKEKIDMNQKKNQEEYEKILNKIYDEKGIEITNKDYKKQKKLVLKLKLWNEQEGLCLYSGKKIAIEDLLNHPEFFEIDHIIPKSISLDDSRSNKVLVYKTENSIKENDTPYHYLTRINGKWGFDEYKANVLELRRRGKIDDKKVNNLLCMEDITKIDVVKGFINRNLNDTRYASRVVLNEMQSFFESRKYCNTKVKVIRGSLTYQMRQDLHLKKNREESYSHHAVDAMLIAFSQKGYEAYRKIQKDCYDFETGEILDKEKWNKYIDDDEFDDILYKERMNEIRKKIIEAEEKVKYNYKIDKKCNRGLCNQTIYGTREKDGKIHKISSYNIYDDKECNSLKKMINSGKGSDLLMYNNDPKTYRDMLKILETYSSEKNPFVAYNKETGDYFRKYSKNHNGPKVEKVKYYSGQINSCIDISHKYGHAKNSKKVVLVSLNPYRTDVYYDNDTGKYYLVGVKYNHIKCVGNKYVIDSETYNELLRKEGVLNSDENLEDLNSKNITYKFSLYKNDIIQYEKGGEYYTERFLSRIKEQKNLIETKPINKPNFQRKNKKGEWENTRNQIALAKTKYVGKLVTDVLGNCYIVNMEKFSLVVDK

SEQ ID NO: 58 - protein, 1136 aa, Streptococcus gordonii
MNGLVLGLDIGIASVGVGILEKDTGKIIHASSRLFPAATADNNVERRSNRQGRRLNRRKKHRSVRLQDLFEGYGLLTDFSKVSMNLNPYQLRVQGMENQLTNEELFVALKNIVKRRGISYLDDASEDGGTVSSDYGKAVEENRKLLAEKTPGQIQLERFEKYGQLRGDFTVEENGEKHRLINVFSTSAYRKEAERILRKQQEFNSKITDEFIEDYLIILTGKRKYYHGPGNEKSRTDYGRFRTDGTTLDNIFGILIGKCTFYTEEYRASKASYTAQEFNLLNDLNNLTVPTETKKLSEEQKKLIIEYAKSAKTLGASTLLKYIAKMIDASVDQIRGYRVDVNNKPEMHTFEVYRKMQSLETIKVEELPRKVLDELAHILTLNTEREGIEEAINSKLKDIFNRDQVLELVQFRKNNSSLFSKGWHNFSIKLMMELIPELYETSEEQMTILTRLGKQRSKETSKRTKYIDEKELTEEIYNPVVAKSVRQAIKIINEATKKYGIFDNIVIEMARENNEEDAKKDYIKRQKANQDEKNAAMEKAAFQYNGKKELPDNIFHGHKELTTKIRLWHQQGEKCLYTGKNIPISDLIHNQYKYEIDHILPLSLSFDDSLSNKVLVLATANQEKGQRTPFQALDSMDDAWSYREFKSYVKDSKLLSNKKKDYLLTEEDISKIEVKQKFIERNLVDTRYSSRVVLNALQDFYKSHQLDTTISVVRGQFTSQLRRKWGIEKSRETYHHHAVDALIIAASSQLRLWKKHSNPLIAYKEGQFVDSETGEIVSLSDEEYKELVFKAPYDHFVDTLRSKKFEDSILFSYQVDSKYNRKISDATIYATRKAKLDKEKKEYTYTLGKIKDIYALGTKTPSKTGFYKFLDLYKTDKSQFLMYQKDRKTWDEVIEKIIEQYRPFKEYDKNGKEVDFNPFEKYRIGNGPIRKYSKKGNGPEIKSLKYYDILLGKHKNITPDGSRNTVALLSLNPWRTDVYYNSETKKYEFLGLKYADLCFEEGGAYGISEVKYKKIREKEGIGKNSEFKFTLYKNDLILIKDTETNCQQFFRFWSRTGKDNPKSFEKHKIELKPYEKAKFEKGEELKVLGKVPPSSNQFQKNMQIENLSIYKVKTDILGNKHFIKKEGDEPKLKFKK

SEQ ID NO: 59 - protein, 984 aa, Campylobacter jejuni
MARILAFDIGISSIGWAFSENDELKDCGVRIFTKAENPKTGESLALPRRLARSARKRLARRKARLNHLKHLIANEFKLNYEDYQSFDESLAKAYKGSLISPYELRFRALNELLSKQDFARVILHIAKRRGYDDIKNNGDEEKSEILKAIKQNEEKLVNYQSVGEYLYKEYFQKFKENSKEFINVRNKKESYERCITQSFLKDELKLIFQKQREFGFSFSKKFEEEVLSVAFYKRALKDFSHLVGNCSFFTDEKRAPKNSPLAFMFVALTRIINILNNLKNTEGILYTKDDLNALLNEVLKNGTLTYKQTKKLLGLSDDYEFKGEKGTYFIEFKKYKEFIKALGEHNLSQDDLNEIAKDITLIKDEIKLKKALAKYDLNQNQIDSLSKLEFKDHLNISFKALKLITPLMLEGKKYDEACNELNLKVAINEDKKDFLPAFNETYYKDEVTNPVVLRAIKEYRKILNALLKKYGKVHKINIELAREVGKNHSQRAKIEKEQNENYKAKKDAEIECEKLGLKINSKNILKLRLFKEQKEFCAYSGEKIKLSDLQDEKMLEIDHIYPYSRSFDDSYMNKVLVFTKQNQEKLNKTPFEAFGNDSTKWQKIEVLAKNLPEKKQKRILDKNYKDKEQKDFKDRNLNDTRYIARLVLNYTKDYLDFLPLSDDENTKLNDTQKGSKVHVEAKSGMLTSALRHTWGFSAKDRNNHLHHAIDAAIIAYANNSIVKAFSDFKKEQESNSVELYAKKISELDYKNKRKFFEPFSGFRQKVLDKIDEIFVSKPERKKPSGALHEETFRKEEEFYQSYGGKEGVLKALELGKIRKVNGKIVKNGDMFRVDIFKHKKTNKFYAVPIYTMDFALKVLPNKAVARSKKGEIKDWILMDENYEFCFSLYKDSLILIQTKDMQEPELVYFNAFTSSTVSLIVSKHDNKFETLSKNQKILFKNANEKEVIAKSIGIQNLKVFEKYIVSALGEVTKAEFRQREDFKK

SEQ ID NO: 60 - protein, 1079 aa, Dinoroseobacter shibae
MRLGLDIGTSSIGWWLYETDGAGSDARITGVVDGGVRIFSDGRDPKSGASLAVDRRAARAMRRRRDRYLRRRATLMKVLAETGLMPADPAEAKALEALDPFALRAAGLDEPLPLPHLGRALFHLNQRRGFKSNRKTDRGDNESGKIKDATARLDMEMMANGARTYGEFLHKRRQKATDPRHVPSVRTRLSIANRGGPDGKEEAGYDFYPDRRHLEEEFHKLWAAQGAHHPELTETLRDLLFEKIFFQRPLKEPEVGLCLFSGHHGVPPKDPRLPKAHPLTQRRVLYETVNQLRVTADGREARPLTREERDQVIHALDNKKPTKSLSSMVLKLPALAKVLKLRDGERFTLETGVRDAIACDPLRASPAHPDRFGPRWSILDADAQWEVISRIRRVQSDAEHAALVDWLTEAHGLDRAHAEATAHAPLPDGYGRLGLTATTRILYQLTADVVTYADAVKACGWHHSDGRTGECFDRLPYYGEVLERHVIPGSYHPDDDDITRFGRITNPTVHIGLNQLRRLVNRIIETHGKPHQIVVELARDLKKSEEQKRADIKRIRDTTEAAKKRSEKLEELEIEDNGRNRMLLRLWEDLNPDDAMRRFCPYTGTRISAAMIFDGSCDVDHILPYSRTLDDSFPNRTLCLREANRQKRNQTPWQAWGDTPHWHAIAANLKNLPENKRWRFAPDAMTRFEGENGFLDRALKDTQYLARISRSYLDTLFTKGGHVWVVPGRFTEMLRRHWGLNSLLSDAGRGAVKAKNRTDHRHHAIDAAVIAATDPGLLNRISRAAGQGEAAGQSAELIARDTPPPWEGFRDDLRVRLDRIIVSHRADHGRIDHAARKQGRDSTAGQLHQETAYSIVDDIHVASRTDLLSLKPAQLLDEPGRSGQVRDPQLRKALRVATGGKTGKDFENALRYFASKPGPYQAIRRVRIIKPLQAQARVPVPAQDPIKAYQGGSNHLFEIWRLPDGEIEAQVITSFEAHTLEGEKRPHPAAKRLLRVHKGDMVALERDGRRVVGHVQKMDIANGLFIVPHNEANADTRNNDKSDPFKWIQIGARPAIASGIRRVSVDEIGRLRDGGTRPI

SEQ ID NO: 61 - protein, 1096 aa, Eubacterium dolichum
MMEVFMGRLVLGLDIGITSVGFGIIDLDESEIVDYGVRLFKEGTAAENETRRTKRGGRRLKRRRVTRREDMLHLLKQAGIISTSFHPLNNPYDVRVKGLNERLNGEELATALLHLCKHRGSSVETIEDDEAKAKEAGETKKVLSMNDQLLKSGKYVCEIQKERLRTNGHIRGHENNFKTRAYVDEAFQILSHQDLSNELKSAIITIISRKRMYYDGPGGPLSPTPYGRYTYFGQKEPIDLIEKMRGKCSLFPNEPRAPKLAYSAELFNLLNDLNNLSIEGEKLTSEQKAMILKIVHEKGKITPKQLAKEVGVSLEQIRGFRIDTKGSPLLSELTGYKMIREVLEKSNDEHLEDHVFYDEIAEILTKTKDIEGRKKQISELSSDLNEESVHQLAGLTKFTAYHSLSFKALRLINEEMLKTELNQMQSITLFGLKQNNELSVKGMKNIQADDTAILSPVAKRAQRETFKVVNRLREIYGEFDSIVVEMAREKNSEEQRKAIRERQKFFEMRNKQVADIIGDDRKINAKLREKLVLYQEQDGKTAYSLEPIDLKLLIDDPNAYEVDHIIPISISLDDSITNKVLVTHRENQEKGNLTPISAFVKGRFTKGSLAQYKAYCLKLKEKNIKTNKGYRKKVEQYLLNENDIYKYDIQKEFINRNLVDTSYASRVVLNTLTTYFKQNEIPTKVFTVKGSLTNAFRRKINLKKDRDEDYGHHAIDALIIASMPKMRLLSTIFSRYKIEDIYDESTGEVFSSGDDSMYYDDRYFAFIASLKAIKVRKFSHKIDTKPNRSVADETIYSTRVIDGKEKVVKKYKDIYDPKFTALAEDILNNAYQEKYLMALHDPQTFDQIVKVVNYYFEEMSKSEKYFTKDKKGRIKISGMNPLSLYRDEHGMLKKYSKKGDGPAITQMKYFDGVLGNHIDISAHYQVRDKKVVLQQISPYRTDFYYSKENGYKFVTIRYKDVRWSEKKKKYVIDQQDYAMKKAEKKIDDTYEFQFSMHRDELIGITKAEGEALIYPDETWHNFNFFFHAGETPEILKFTATNNDKSNKIEVKPIHCYCKMRLMPTISKKIVRIDKYATDVVGNLYKVKKNTLKFEFD

SEQ ID NO: 62 - protein, 1082 aa, Neisseria meningitidis
MAAFKPNPINYILGLDIGIASVGWAMVEIDEDENPICLIDLGVRVFERAEVPKTGDSLAMARRLARSVRRLTRRRAHRLLRARRLLKREGVLQAADFDENGLIKSLPNTPWQLRAAALDRKLTPLEWSAVLLHLIKHRGYLSQRKNEGETADKELGALLKGVADNAHALQTGDFRTPAELALNKFEKESGHIRNQRGDYSHTFSRKDLQAELNLLFEKQKEFGNPHISDGLKEGIETLLMTQRPALSGDAVQKMLGHCTFEPAEPKAAKNTYTAERFIWLTKLNNLRILEQGSERPLTDTERTTLIDEPYRKSKLTYAQARKLLELDNTAFFKGLRYGKDNAEASTLMEMKAYHAISRALEKEGLKDKKSPLNLSPELQDEIGTAFSLFKTDEDITGRLKDRVQPEILEALLKHISFDKFVQISLKALRRIVPLMEQGKRYDEACAEIYGDHYGKKNTEEKIDLPPIPADEIRNPVVLRALSQARKVINGVVRRYGSPARIHIETAREVGKSFKDRKEIEKRQEENRKDREKAATKFREYFPNFVGEPKSKDILKLRLYEQQHGKCLYSGKEINLGRLNEKGYVEIDHALPFSRTWDDSFNNKVLVLGSENQNKGNQTPYEYFNGKDNSREWQEFKARVETSRFPRSKKQRILLQKFDEEGFKERNLNDTRYVNRFLCQFVADHMLLTGKGKRRVFASNGQITNLLRGFWGLRKVRAENDRHHALDAVVVACSTVAMQQKITRFVRYKEMNAFDGKTIDKETGEVLHQKTHFPQPWEFFAQEVMIRVFGKPDGKPEFEEADTPEKLRTLLAEKLSSRPEAVHEYVTPLFVSRAPNRKMSGQGHMETVKSAKRLDEGVSVLRVPLTQLKLKDLEKMVNREREPKLYEALKARLEAHKDDPAKAFAEPFYKYDKAGNRTQQVKAVRVEQVQKTGVWVRNHNGIADNATMVRVDVFEKGDKYYLVPIYSWQVAKGILPDRAVVQGKDEEDWQLIDDSFNFKFSLHPNDLVEVITKKARMFGYFASCHRGTGNINIRIHDLDHKIGKNGILEGIGVKTALSFQKYQIDELGKEIRPCRLKKRPPVR

SEQ ID NO: 63 - protein, 1050 aa, Gluconacetobacter diazotrophicus
MGENMIDESLTFGIDLGIGSCGWAVLRRPSAFGRKGVIEGMGSWCFDVPETSKERTPTNQIRRSNRLLRRVIRRRRNRMAAIRRLLHAAGLLPSTDSDALKRPGHDPWELRARGLDKPLKPVEFAVVLGHIAKRRGFKSAAKRKATNISSDDKKMLTALEATRERLGRYRTVGEMFARDPDFASRRRNREGKYDRTTARDDLEHEVHALFAAQRRLGQGFASPELEEAFTASAFHQRPMQDSERLVGFCPFERTEKRAAKLTPSFERFRLLARLLNLRITTPDGERPLTVDEIALVTRDLGKTAKLSIKRVRTLIGLEDNQRFTTIRPEDEDRDIVARTGGAMTGTATLRKALGEALWTDMQERPEQLDAIVQVLSFFEANETITEKLREIGLTLAVLDVLLTALDAGVFAKFKGAAHISTKAARNLLPHLEQGRRYDEACTMAGYDHAASRLSHHGQIVAKTQFNALVTEIGESIANPIARKALIEGLKQIWAMRNHWGLPGSIHVELARDVGNSIEKRREIEKHIEKNTALRARERREVHDLLDLEDVNGDTLLRYRLWKEQGGKCLYTGKAIHIRQIAATDNSVQVDHILPWSRFGDDSFNNKTLCLASANQQKKRSTPYEWLSGQTGDAWNAFVQRIETNKELRGFKKRNYLLKNAKEAEEKFRSRNLNDTRYAARLFAEAVKLLYAFGERQEKGGNRRVFTRPGALTAALRQAWGVESLKKQDGKRINDDRHHALDALTVAAVDEAEIQRLTKSFHEWEQQGLGRPLRRVEPPWESFRADVEATYPEVFVARPERRRARGEGHAATIRQVKERECTPIVFERKAVSSLKEADLERIKDGERNEAIVEAIRSWIATGRPADAPPRSPRGDIITKIRLATTIKAAVPVRGGTAGRGEMVRADVFSKPNRRGKDEWYLVPVYPHQIMNRKAWPKPPMRSIVANKDEDEWTEVGPEHQFRFSLYPRSNIEIIRPSGEVIEGYFVGLHRNTGALTISAHNDPKSIHSGIGTKTLLAISKYQVDRFGRKSPVRKEVRTWHGEACISPTPPG

SEQ ID NO: 64 - protein, 1391 aa, Kordia algicida
MKKILGLDLGTNSIGWALVNEAEHEHEQSSIVKLGVRVNPLSVDEKTNFEKGRPLSINADRTSKRSARRNLQRFKLRRKNLINLLLKHHIISNETILTEVGKNTTHQTLKLRSKATQEKISLEEFARILLSINKKRGYKSSRKEKNEDEGFTIDGMAIAKELYDNQLTPGQYVYNILQDGKNYIPDFYRSDLQAEFDDVWQFQKKFYSSILTDEFYLKLKGQGKENTRKLFLAIHQVYTAENKGKRDAVKLQYYKWRSEAVKKQLSIEEVAYVLVEINNNINKSSGYLGAISDRSKALYFNNETVGEYLYGQLVKNRHNSLRNQVFYRQDYLDEFEKIWETQAKFYDELTNELKQEIRDVVIFYQRKLKSQKHLISDCLFEKHHKAIPKSSPLFQEFKIWQNLNYLEFVHTQSKEKIFFSELDDETRQFVFAELNIRGTLKIKEIKKLIGLETPVYWKSNFDEIEGNRTNQVLYNVYQNIADDLGYGFDWSKKHAFEINAELQAIFKDVGIDTAILNFDASIEENDFDKQKSYQLWHLLYSAEDTDKATEEDKLIYGNINTKLKKQLHQKYGFEAKYGNLLANISLQQDYGNLSAKAIKKILPYLESGNSFYEACTIVGYNPSNSLTKEQQQNRKLKDKLELLPKNSLRNPVVEKILNQKVNLINQLIDEYGKPDEVRIELARELKKSAKQRADLSKHINDATLKNQNIRKTLQKDFGIQNPSKNDVIRYKLYDELKDNGYKTLFTNKYIPKEQLFSKDVDIEHIIPKAILFDDSFSNKTLAYRNVNLAKADATAFDFISSKHLDDLDNYKARVETLFQSKRISKGKYKKLLMTRQNLPEDFIERDLRNSQYIAKKATAMLKEVFRSVVPTSGRITDKLREDWDLVNVMKELNLPKYRTLGLTEFIERKNGNKIEQIIDWTKRNDHRHHAMDALTVAFTTHNHIQYLNNLNVTHGLNGVDTDHEKSRLYAIKQAITKVYIVGKTKKRKFIPPMENFRSHAKNHLEGILISFKNKNKVVTKNKNRTKTKTKGVFNEKIQLTPRGQLHKETIYGHAKKVIVTKEKVSSKFTHEKILQVTKPAYREALLKRLASFKNDPKKAFSGKNALSKNPLYFDITSGKKVPDTVKLSYFENSYVIRKEVNSDNFKNEKSLQKVLDVGIRRILEKRLADYNGNAKEAFSNLEKNPIWKDKEKGVCIKKVRIEALKNAEPLHVKKDHLGKIILDDENKSTPVDFISTGNNHHVAIYEDKDGKLHDKVVSFYEVVSRVNLGLPIIDKSFNSHLDWKFLFSMKQNEMFVFPSEDFNPKEIDIGNPKNNELISKYLFRVQKFSKVTYGNSAVRDYVFRHHLETELIDKKELKGITYYQLKSIGMLEKLVKVRINHIGKIVHIGEY

SEQ ID NO: 65 - protein, 1116 aa, Clostridium spiroforme
MVEFLLKEMKIMGRLVLGLDIGITSVGYGVIDIDKNEFVDYGVRLFKEGTAINNEERRSKRGARRLKRRKTNRIADMKKLLERNGLIDEQYTALNNPYEIRKKGLKNKLSNYELATAILHITKNRGTCLESNADETQDEESTKNILSKNALELKDKYICEIQLARLEESGKIRGINNNFKTEDYLKELSKILENQDLEKETIDKIKEIVARRRRYDQGPGSEKSPTPYGSYRMENGELVHVNLIDMMRGKCSVFPDQLRAPQQSYSAELFNLLNDLNNLKINGEKLSSTEKQKIIDFVNEKGGITVKQLLKLIDVGITEISGFRIDKNEKPLITEFKGYKKVLKVFKNYNQESLLNDKSIVDTIMDINTKIKSIDERSDQLKQVLPSLDTSIINDLASIKGVSGYHSLSLKALNLINNEMLKTEMNQMQVLHQLDIFDKNRVSLKGQRQIYADDNAILSPVAKRAHRETFKVINKLRSIYGEFDSIVIETTRDKNTQDQKKRIKNNQKNYEERNTEVNNFLKEAGYNPENINAKTKMKIRLYIEQDAKSAYTLQDINLKELIEDEKAYEIDHIIPISISLDDSFNNKVLTTHDENQEKGNLTPISAFLKGKFHNGNLNTYKVFIQNNKNLNRKKKEYLLCEDDITRYEVVQNFINRNLVDTSYACRTVMNTLVHYFKDNEINTKVHTIKGQATSTFRKRIGLIKDREEDYFHHAIDALIVASLKKMNLINSYLMKVDFNEMYDEETGEIFNVLPDNSYLDEKYISFVSNLKNIYEESNKYIRGVMIKEKMTYPLIKVSHKIDTKPNRKISDDTIYSTRNVDNQDMLVERIKNIYDPKENAANTLINDIINDNTDKYIMYHKDPQTFDKIKAIVLNHFNEFKTDKNCYIVTKEGLYKLKGTSPLALYYEEFGPITKYAKKNNGPTIHSMKFYSEKLGNHLSITHKYSTVNKKVITKQISPYRTDFYQSPEGKYKFVTVRYKDVAYNAKKDKYIIDHSWYREQKKLKKIADEWIFVCSVHRDELIGIMKADGQKRIFDSSTESDGETLYHDAKTYEILKFTATNNDITGRFEVKPIYCYCKKQLMVSIGTCRKIQKFATDVLGNLYIVKDNVLKLEFK

SEQ ID NO: 66 - protein, 1348 aa, Finegoldia magna
MKSEKKYYIGLDVGTNSVGWAVTDEFYNILRAKGKDLWGVRLFEKADTAANTRIFRSGRRRNDRKGMRLQILREIFEDEIKKVDKDFYDRLDESKFWAEDKKVSGKYSLFNDKNFSDKQYFEKFPTIFHLRKYLMEEHGKVDIRYYFLAINQMMKRRGHFLIDGQISHVTDDKPLKEQLILLINDLLKIELEEELMDSIFEILADVNEKRTDKKNNLKELIKGQDFNKQEGNILNSIFESIVTGKAKIKNIISDEDILEKIKEDNKEDFVLTGDSYEENLQYFEEVLQENITLFNTLKSTYDFLILQSILKGKSTLSDAQVERYDEHKKDLEILKKVIKKYDEDGKLFKQVFKEDNGNGYVSYIGYYLNKNKKITAKKKISNIEFTKYVKGILEKQCDCEDEDVKYLLGKIEQENFLLKQISSINSVIPHQIHLFELDKILENLAKNYPSFNNKKEEFTKIEKIRKTFTFRIPYYVGPLNDYHKNNGGNAWIFRNKGEKIRPWNFEKIVDLHKSEEEFIKRMLNQCTYLPEETVLPKSSILYSEYMVLNELNNLRINGKPLDTDVKLKLIEELFKKKTKVTLKSIRDYMVRNNFADKEDFDNSEKNLEIASNMKSYIDFNNILEDKFDVEMVEDLIEKITIHTGNKKLLKKYIEETYPDLSSSQIQKIINLKYKDWGRLSRKLLDGIKGTKKETEKTDTVINFLRNSSDNLMQIIGSQNYSFNEYIDKLRKKYIPQEISYEVVENLYVSPSVKKMIWQVIRVTEEITKVMGYDPDKIFIEMAKSEEEKKTTISRKNKLLDLYKAIKKDERDSQYEKLLTGLNKLDDSDLRSRKLYLYYTQMGRDMYTGEKIDLDKLFDSTHYDKDHIIPQSMKKDDSIINNLVLVNKNANQTTKGNIYPVPSSIRNNPKIYNYWKYLMEKEFISKEKYNRLIRNTPLTNEELGGFINRQLVETRQSTKAIKELFEKFYQKSKIIPVKASLASDLRKDMNTLKSREVNDLHHAHDAFLNIVAGDVWNREFTSNPINYVKENREGDKVKYSLSKDFTRPRKSKGKVIWTPEKGRKLIVDTLNKPSVLISNESHVKKGELFNATIAGKKDYKKGKIYLPLKKDDRLQDVSKYGGYKAINGAFFFLVEHTKSKKRIRSIELFPLHLLSKFYEDKNTVLDYAINVLQLQDPKIIIDKINYRTEIIIDNFSYLISTKSNDGSITVKPNEQMYWRVDEISNLKKIENKYKKDAILTEEDRKIMESYIDKIYQQFKAGKYKNRRTTDTIIEKYEIIDLDTLDNKQLYQLLVAFISLSYKTSNNAVDFTVIGLGTECGKPRITNLPDNTYLVYKSITGIYEKRIRIK

SEQ ID NO: 67 - protein, 1129 aa, Streptococcus infantarius
MSNGKILGLDIGVASVGVGIIDSKTGNVIHANSRLFSAANAENNAERRGFRGARRLTRRKKHRVKRVRDLFEKYDISTDFRNLNLNPYELRVKGLTEQLTNEELFAALRTIAKRRGISYLDDAEDDSTGSSDYAKSIDENRRLLKTKTPGQIQLERLEKYGQLRGNFTVYDENGEAHRLINVFSTSDYKNEARKILETQSNYNKQITDEFIEDYIEILTQKRKYYHGPGNEKSRTDYGRFRTDGTTLENIFGILIGKCSFYPEEYRASKASYTAQEFNFLNDLNNLKVPTETGKLSTEQKEYLVDFAKKSKALGASKLLKEIAKIVDCSVDDIKGYRVDNKDKPDLHTFEPYRKLKFNLSSIDIDELSRETLDKLADILTLNTEREGIEDAIKRNLPSQFTEEQISEIVQIRKNQSSAFNKGWHSFSAKLMNELIPELYVTSEEQMTILTRLEKFKVNKKSSKNTKTIDEKEITDEIYNPVVAKSVRQTIKIINAAVKKYGDFDKIVIEMPRDKNAEDEKKFIDKKQKENKKEKDDSLKRAAFLYNGTDNLPDGVFHGNKELKTKIRLWYQQGERCLYSGKLISIHDLVHNSNKFEIDHILPLSLSFDDSLANKVLVYAWTNQEKGQKTPYQVIDSMDTAWSFREMKDYVLKQKGLGKKKCEYLLTTENIDKIEVKKKFIERNLVDTRYASRVVLNSLQTALKELGKDTKVSVVRGQFTSQLRRKWNIDKSRETYHHHAVDALIIAASSQLKLWQKQENPMFESYGENQVVNKETGEILSISDDKYKELVFQPPYQGFVNTISSKGFEDEILFSYQVDSKFNRKVSDATIYSTRKAKLGKDKKDETYVLGKIKDIYSQDGFDTFIKRYKKDKTQFLMYQKDPLTWENVIEVILRDYPSEKLSEDGKKTVKCNPFEEYRRENGLICKYSKKGNGTPIKSLKYYDKKLGNCIDITPEKSKNRVVLRQISPWRADIYFNLETLKYELMGLKYSDLSFEKGTGKYHISQEKYDAIREKEGIGKKSEFKFTLYRNDLILIKDTLNNCERMLRFGSKNDTSKHYVELKPLEKGTFDSEEEILPVLGKVAKSGQFIKGLNKPNISIYKVRTDVLGNKFFIKKEGDKPKLDFKNNNK

SEQ ID NO: 68 - protein, 1065 aa, Clostridium perfringens
MNKDINYALGLDIGITSVGWAVINLDLNRIEDLGVRIFNAAENLKDGSSLALPRRLARGRRRLLRRKAYRVERVRKLILKNNILTKEELEGLFKNKEVIDVWEARVKGLDYKLSREEWAKILINFCKRRGFKSNRKNEAKDKEAGQILSSISYNIEKMKETNSRTIGEYIYNEVKNSEDSYAPLRNKFGEYKMCVSRDVIREEIHTLFEKQRELGNNFASDEIEDKYFEIFNSQRPFSNFEDLEKLVGFCTFERKKHKRAPKHCISSEEFTLYEGINKLSIIKDGEKRKLSEEERTLVVNEAFNKKEIKYTTLRKLLGLSEEELFSTLTYSIDKDISKTENTKFVSLKGYHEIKRAIEKGVSKKAWQDIENNRNLLNDIAYVLTLGKTDDEIEKQLRLRNVPEELFESLLDMSFNKFNNLSIYALEKILPFMKEGYQYNEACEKAGYNFKAIYEGVRTKKLPVIEIDEIVNPVVNRALAQTRKVINSVIDKYGSPVRINIELARDLAKNFKDRKLIEKEQKENRANLDKIRENLRELMDKEPTVVEVLKYRLWEQQRGECAYTQSQIPLERLFSPGYCEIDHIIPFSRSFDDSLSNKILVLGSENQRKGNRTPYEYFGEDSERWNSFEIWVKGSYLNYKKKANLLKKKFSEEEQRDWKARNLQDTKYICRYISNFVNNRLEFKESENKQKVITVNGRATAYLRSRWGLNKVREDGDKHHALDAAVVGVTTQGMVQKISKYSKAHELYTVRKNDEFVDVETGECVDVDEYKEIRKDILPRPWRGFSEELKLRLSDNPLEELKKSPIETYNEEFIKENVKPIFVSRVPFRKISGKLFKETIYSERAFKDGYFVSKKSLVDLKRGDLDNFYNYECDKKLYDAISERMKEFNYNGKKAFESPFRKPTKSGKEGPVVRSVKIKSAVPFKDGIPMNEGLVAKEGMVRIDIYEKEGKYFVVPVYRYQLAKGIVPKRAAIAKKDELKWPIMDQTYNFKFSIYKNDLIEVKYDKKGVYFGYYDGFDRNSASLTIEKHDNSERYRSIGLKVGVLEINKYEVDVLGNYHKVKLGGN

SEQ ID NO: 69 - protein, 1195 aa, Elusimicrobium minutum
MQKNINTKQNHIYIKQAQKIKEKLGDKPYRIGLDLGVGSIGFAIVSMEENDGNVLLPKEIIMVGSRIFKASAGAADRKLSRGQRNNHRHTRERMRYLWKVLAEQKLALPVPADLDRKENSSEGETSAKRFLGDVLQKDIYELRVKSLDERLSLQELGYVLYHIAGHRGSSAIRTFENDSEEAQKENTENKKIAGNIKRLMAKKNYRTYGEYLYKEFFENKEKHKREKISNAANNHKFSPTRDLVIKEAEAILKKQAGKDGFHKELTEEYIEKLTKAIGYESEKLIPESGFCPYLKDEKRLPASHKLNEERRLWETLNNARYSDPIVDIVTGEITGYYEKQFTKEQKQKLFDYLLTGSELTPAQTKKLLGLKNTNFEDIILQGRDKKAQKIKGYKLIKLESMPFWARLSEAQQDSFLYDWNSCPDEKLLTEKLSNEYHLTEEEIDNAFNEIVLSSSYAPLGKSAMLIILEKIKNDLSYTEAVEEALKEGKLTKEKQAIKDRLPYYGAVLQESTQKIIAKGFSPQFKDKGYKTPHTNKYELEYGRIANPVVHQTLNELRKLVNEIIDILGKKPCEIGLETARELKKSAEDRSKLSREQNDNESNRNRIYEIYIRPQQQVIITRRENPRNYILKFELLEEQKSQCPFCGGQISPNDIINNQADIEHLFPIAESEDNGRNNLVISHSACNADKAKRSPWAAFASAAKDSKYDYNRILSNVKENIPHKAWRFNQGAFEKFIENKPMAARFKTDNSYISKVAHKYLACLFEKPNIICVKGSLTAQLRMAWGLQGLMIPFAKQLITEKESESFNKDVNSNKKIRLDNRHHALDAIVIAYASRGYGNLLNKMAGKDYKINYSERNWLSKILLPPNNIVWENIDADLESFESSVKTALKNAFISVKHDHSDNGELVKGTMYKIFYSERGYTLTTYKKLSALKLTDPQKKKTPKDFLETALLKFKGRESEMKNEKIKSAIENNKRLFDVIQDNLEKAKKLLEEENEKSKAEGKKEKNINDASIYQKAISLSGDKYVQLSKKEPGKFFAISKPTPTTTGYGYDTGDSLCVDLYYDNKGKLCGEIIRKIDAQQKNPLKYKEQGFTLFERIYGGDILEVDFDIHSDKNSFRNNTGSAPENRVFIKVGTFTEITNNNIQIWFGNIIKSTGGQDDSFTINSMQQYNPRKLILSSCGFIKYRSPILKNKEG

SEQ ID NO: 70 - protein, 1101 aa, Akkermansia muciniphila
MSRSLTFSFDIGYASIGWAVIASASHDDADPSVCGCGTVLFPKDDCQAFKRREYRRLRRNIRSRRVRIERIGRLLVQAQIITPEMKETSGHPAPFYLASEALKGHRTLAPIELWHVLRWYAHNRGYDNNASWSNSLSEDGGNGEDTERVKHAQDLMDKHGTATMAETICRELKLEEGKADAPMEVSTPAYKNLNTAFPRLIVEKEVRRILELSAPLIPGLTAEIIELIAQHHPLTTEQRGVLLQHGIKLARRYRGSLLFGQLIPRFDNRIISRCPVTWAQVYEAELKKGNSEQSARERAEKLSKVPTANCPEFYEYRMARILCNIRADGEPLSAEIRRELMNQARQEGKLTKASLEKAISSRLGKETETNVSNYFTLHPDSEEALYLNPAVEVLQRSGIGQILSPSVYRIAANRLRRGKSVTPNYLLNLLKSRGESGEALEKKIEKESKKKEADYADTPLKPKYATGRAPYARTVLKKVVEEILDGEDPTRPARGEAHPDGELKAHDGCLYCLLDTDSSVNQHQKERRLDTMTNNHLVRHRMLILDRLLKDLIQDFADGQKDRISRVCVEVGKELTTFSAMDSKKIQRELTLRQKSHTDAVNRLKRKLPGKALSANLIRKCRIAMDMNWTCPFTGATYGDHELENLELEHIVPHSFRQSNALSSLVLTWPGVNRMKGQRTGYDFVEQEQENPVPDKPNLHICSLNNYRELVEKLDDKKGHEDDRRRKKKRKALLMVRGLSHKHQSQNHEAMKEIGMTEGMMTQSSHLMKLACKSIKTSLPDAHIDMIPGAVTAEVRKAWDVFGVFKELCPEAADPDSGKILKENLRSLTHLHHALDACVLGLIPYIIPAHHNGLLRRVLAMRRIPEKLIPQVRPVANQRHYVLNDDGRMMLRDLSASLKENIREQLMEQRVIQHVPADMGGALLKETMQRVLSVDGSGEDAMVSLSKKKDGKKEKNQVKASKLVGVFPEGPSKLKALKAAIEIDGNYGVALDPKPVVIRHIKVFKRIMALKEQNGGKPVRILKKGMLIHLTSSKDPKHAGVWRIESIQDSKGGVKLDLQRAHCAVPKNKTHECNWREVDLISLLKKYQMKRYPTSYTGTPR

SEQ ID NO: 71 - protein, 1187 aa, Bifidobacterium longum
MLSRQLLGASHLARPVSYSYNVQDNDVHCSYGERCFMRGKRYRIGIDVGLNSVGLAAVEVSDENSPVRLLNAQSVIHDGGVDPQKNKEAITRKNMSGVARRTRRMRRRKRERLHKLDMLLGKFGYPVIEPESLDKPFEEWHVRAELATRYIEDDELRRESISIALRHMARHRGWRNPYRQVDSLISDNPYSKQYGELKEKAKAYNDDATAAEEESTPAQLVVAMLDAGYAEAPRLRWRTGSKKPDAEGYLPVRLMQEDNANELKQIFRVQRVPADEWKPLFRSVFYAVSPKGSAEQRVGQDPLAPEQARALKASLAFQEYRIANVITNLRIKDASAELRKLTVDEKQSIYDQLVSPSSEDITWSDLCDFLGFKRSQLKGVGSLTEDGEERISSRPPRLTSVQRIYESDNKIRKPLVAWWKSASDNEHEAMIRLLSNTVDIDKVREDVAYASAIEFIDGLDDDALTKLDSVDLPSGRAAYSVETLQKLTRQMLTTDDDLHEARKTLFNVTDSWRPPADPIGEPLGNPSVDRVLKNVNRYLMNCQQRWGNPVSVNIEHVRSSFSSVAFARKDKREYEKNNEKRSIFRSSLSEQLRADEQMEKVRESDLRRLEAIQRQNGQCLYCGRTITFRTCEMDHIVPRKGVGSTNTRTNFAAVCAECNRMKSNTPFAIWARSEDAQTRGVSLAEAKKRVTMFTFNPKSYAPREVKAFKQAVIARLQQTEDDAAIDNRSIESVAWMADELHRRIDWYFNAKQYVNSASIDDAEAETMKTTVSVFQGRVTASARRAAGIEGKIHFIGQQSKTRLDRRHHAVDASVIAMMNTAAAQTLMERESLRESQRLIGLMPGERSWKEYPYEGTSRYESFHLWLDNMDVLLELLNDALDNDRIAVMQSQRYVLGNSIAHDATIHPLEKVPLGSAMSADLIRRASTPALWCALTRLPDYDEKEGLPEDSHREIRVHDTRYSADDEMGFFASQAAQIAVQEGSADIGSAIHHARVYRCWKTNAKGVRKYFYGMIRVFQTDLLRACHDDLFTVPLPPQSISMRYGEPRVVQALQSGNAQYLGSLVVGDEIEMDFSSLDVDGQIGEYLQFFSQFSGGNLAWKHWVVDGFFNQTQLRIRPRYLAAEGLAKAFSDDVVPDGVQKIVTKQGWLPPVNTASKTAVRIVRRNAFGEPRLSSAHHMPCSWQWRHE

SEQ ID NO: 72 - protein, 166 aa, uncultured Termite
MNKVQEIEYKKIREKLADREYRIGLDLGVGSIGYVVVSLKECNDLSYLPEDIILSGSRIFKSSIGAVERREFRLQRNSHRHHRERMRFLWQLLAEKQLALQSSKDLEKKENSADCETSQKRFPINILKEDPYILRYKALEEKLSLFQLGYVLYHIANHSNTAYENT

SEQ ID NO: 73 - protein, 1032 aa, uncultured Termite
MLYHIANHRGTDSVRSFLEYDDDKIKENTLTAKIAKETKKVIDAKKYRTFGEYLYKGKIEKFQQNIRKKVSNRKTPANKNKEFAVTRDVIIKETEKILASQKQYYTYILTDEYIKKIKDAISYQTEKLIPESGYCPYFKDEKRLPRSHKLNEYRRMYEALNNAKYFDPVLDENTGEILSYQEKEFSREEKKILFDEVLLKGMELTESGAKKLLYHLPDGCEVQLQGRDKTTQKIKGYALVDLEASPFWLRLSQQQQDEFLYDWNSLPLEKLKPKLTNYYSLTESEVDETFQEIKLPSNYASVGKKAMEILLTYIKDGCSYTEALEKAVSEGKLKVDKQTMIYDSLPYYGKILKESTQKLIGKAFSKQFADRNYKEPDTNKNEREFGKIANPVVHQTLNELRKLINEIITVFGKKPLEIGLETTRELKKSKKNREYLSKQQNKNEYARNRIYKEYIEPHLSQIKSRQENPSKYISKFELLEEQNFICPFCSEKITPDDIINSKVDVEHIFPIEESEDITKNNLVIAHNECNADKGKKSPFDAFGDKTSGKYRWNCILHNAQKNLPHKVWRFYQGSLEKFLENKPMSRRFGTDNSYISKIAARYLACLFNDPYHSEIFCIKSSLIAQLRIAWDLNSIMVPLVKNILSEKELEEFKISKNKKIRIDNRHHALDAIVIAYANRGYHNFLNRIHAKEYKINYREKSWLSKILLPPLNRDLEDFKISVKDSIEKANVSIKHDHNTNGSLVKATAYKVYYSGAGEYIITTSKNVEEISFKEKEDPKDTLYRALCKFECRDIDIKDEKLIKKLKYNSTLYKKVQNNLSKAKQELEQDNKKTEEEGKKSQKITEVRIYKKACSLVKGQYIQCGSRLKDKFFAVKEPTEIKTGLGYDTGDNLFLDLYYDKTGKLCGEIIRKVNFNRNKPNYQKEGYTLFERIYQSDILEVDTSEDRISLKNKTGSAPSDRTFIKVNTFTEVNAYFDGKRDKIQIFFGNLLKSSFKNDSFFISSMQKYNVRKVILTSLGIIKYRSQILKNKEV

SEQ ID NO: 74 - protein, 1032 aa, uncultured Termite
MKKRILGLDIGIASVGWALVEFDDEFQDNKKKGTIIKSGVRIFTRAETPKERESLAKPRREARSQRRRIRRRVERLNSIRELFVKNGVVEEWSVSKKNPNNIYITLNQIKTPWQLRMESLDRKLTNEQFAVVLTHLAKHRGYKSLRKDDKAGKVLEAISQNKKRLNDSDYRTLGEMFCKNESYKEHKRNKGGEYINSVARELIEEEVEKIFVKQREKGNNFADVNTEREYLKIAFSQKPAGSISKMVGFCTFENGEKRAPRDSYSAELFKVLCTINNTTFTDMKTGEIRSFSKEEIGKTLETVKNVKDVKYAKIRKDLGLEDSVKFSGVDYRENAKSKGEGEIFVSMKTYHEIKSKIEKLSKEKWDNLKGNTELLDSIVNIIANLKDDESIKKEFQKLKIDEDIIDVLLNFEFKKFINLSFKALRKIIPFQFQGQKYITASTSAGYSLKQEGIKNKLVPPAKENINVAVVARAFAQTRKVINAVIRKYGQFDQINIELATELKNSKFDRSKIEEGQKKFQSQKDKIFKEVQELRGGMTPSSSLLLKYRLWREQDERCVYSGRKISFEDLLDTGFLDIDHIIPYSKSMDDSFNNKVLCLAEENRNKKNDIPFNYYQRIDRDWNLLISIITSMKNMKIAKKSRLLKQELSDIEGFIERNINDTRYATRYIKDFLENNLEFKENEFIKVKVQARSGGLTSVLSYNWGMSKDREESYFHHAKDAIIVACSTQGMVQYISKISQQYENDKDKMKKIKDKTENCIPKPWDSFRADVEESIEGIFVSFAPRHKVTGSAHKETIYSKKHLEKERYVTVKKSLDKIKLSDLENIPCNENCGIIRVLKERLEKFKNDSLKAFADPVHMPTKCPNKKGPVIRSVKIKESNKTGIEVRKGLAERGEMVRVDVFIKDKKYYLVPIYVSDFKNKDLPNKAIAALKLENEWIMIDKTYSFKFSLFKDDLIKIKKKKEEIFGYFGGVHRSTGTIKIKSRHKPKEIDEGIGSRCLLDFRKFQVDVLGNYTEVKHEKRMPAYITRKDKKH

SEQ ID NO: 75 - protein, 1361 aa, Lactobacillus casei
MTKLGKPYGIGVDIGSNSIGFAAVDENSHLIRLKGKTVIGARLFEEGKAAADRRASRTTRRRLSRNRWRLSFLRDFFESHITPTGPNFFMRQKYSEISPKDKARYKYEKRLFNDRTDAEFYQQYPTMYHLRNRLLTDPSKADVREIYFAIHHILKSRGHFLTSGYAKDFNTNKVALNEIFPALQDAYAQVYPDLDITFDENKVNEFKTVLLNEKATPSDTQRALVNLLLAEDGDKDILKQQKQVLTEFAKAVVGLKTKLNVALGTEVDSSEATVWNFSLGQLDDKWAGIESAMTDEGTEILDQIRDLYRARLLNGIVPAGKTLSQAKVDDYAQHHEDLELFKDYLKQLEDDGTAKAIRQLYDRYIDGDDAKPFVREDFVKALTKEVTAHPNAKSPELLERLAQPDFMLKQRNKANGAIPVQMQQRELDQIIKNQSVYYDWLAAPNPVEKHRKSMPYQLDELLNFRIPYYVGPLVTAKEQKAAQGGVFAWMVRKDPDGNITPYNFDEKVDREASANTFIQRMKTTDTYLIGEDVLPKQSLLYQRYEVLNELNNVRVNNEKLSIEQKQQVIRELFERHNSVTIKQFAENLRAHGDYAHIPEIRGLADEKRFLSSLSTYRQLKSLLPDAIDDPAKQADIENIIAWSTVFEDAAIFKTKLKEINWLDSQTITKLSNIRYRGWGQFSHKFLNGLTLGNGHTIIQELFLSNNNLMQILTDETLQKKMTELNADKLKAANINDAIDDAYTSPSNKKALRQVLRVIEDIKRAADGQDPSWLYVETADGGGTPGKRTRARQHQLQEIYANAAHELIDSAVRGELEDKIADKADFNDRLVLYFMQGGRDIYTGTPLNIDQLSSYDIDHILPQSLIKDNSLDNRVLVHAIINREKNATFASTIYAQKMNATWRQWHEAGLISGRKLRNLQMRPDQIDKYASGFVARQLVETRQIIKLTEQIVAAQYPETKIIAVKAGLSHQLREELEFPKNRDVNHYHHAFDAFLAARIGTYLLKRFPNLQAFFTYGKFKKADVKKLRGFNFIRDITHAEDKIVVKDTGEVIWDKKRDVDELDRIYNFKRMLITHEVHFEKADLFKQTVYGAKDSKEAGGKKQLISKKKGYPVDIYGGYTQETGSYLSVVRLTKKAMYAVVKVSTRDAAKLAVAKSISEQKENETLNDIIDEKLSKISKNGKITHELFEVVLPRVGQKTLFKNSKYNLFLVNSDTYMHNYQELWMPREYQKMWKDISLSKYGDAQTEDQLDQIFGFIVSQVNSYFNLYDINQFRKKLNDAADKFATLPMRDTDDMQGKIATIGQLLIGLQANAARSDLRNLDIKTPLGLLQIPNGISLDSDTSVVYQSPTGLLEREVHLSDL

SEQ ID NO: 76 - protein, 1348 aa, Streptococcus equi
MKKPYTIALDIGTNSVGWVVVTDDYRVPTKKMKVLGNTERKTIKKNLIGALLFDSGDTAEGTRLKRTARRRYTRRKNRLRYLKEIFTEEMAKVDDGFFQRLEDSFYVLEDKEGNKHPIFANLADEVAYHKKYPTIYHLRKELVDNPQKADLRLIYLAVAHIIKFRGHFLIEGTLSSKNNNLQKSFDHLVDTYNLLFEEQRLLTEGINAKELLSAALSKSKRLENLISLIPGQKKTGIFGNIIALSLGLTPNFKANFGLSKDVKLQLAKDTYADDLDSLLAQIGDQYADLFLAAKNLSDAILLSDILTESDEITRAPLSASMVKRYREHHKDLVTLKTLIKDQLPEKYQEIFLDKTKNGYAGYIEGQVSQEEFYKYLKPILARLDGSEPLLLKIDREDFLRKQRTFDNGSIPHQIHLEELHAILRRQEVFYPFLKDNRKKIESLLTFRIPYYVGPLARGHSRFAWVKRKFDGAIRPWNFEEIVDEEASAQIFIEKMTKNDLYLPNEKVLPKHSLLYETFTVYNELTKVKYATEGMTRPQFLSADQKQAIVDLLFKTNRKVTVKQLKENYFKKIECWDSVEITGVEDSFNASLGTYHDLLKIIQDKDFLDNPDNQKIIEDIILTLTLFEDKKMISKRLDQYAHLFDKVVLNKLERHHYTGWGRLSGKLINGIRDKQSGKTILDFLKADGFANRNFMQLIHDSELSFIDEIAKAQVIGKTEYSKDLVGNLAGSPAIKKGISQTIKIVDELVKIMGYLPQQIVIEMARENQTTAQGIKNARQRMRKLEETAKKLGSNILKEHPVDNSQLQNDKRYLYYLQNGKDMYTGDDLDIDYLSSYDIDHIIPQSFIKNNSIDNKVLTSQGANRGKLDNVPSEAIVRKMKGYWQSLLRAGAISKQKFDNLTKAERGGLTQVDKAGFIQRQLVETRQITKHVAQILDSRFNTEFDDHNKRIRKVHIITLKSKLVSDFRKEFGLYKIRDINHYHHAHDAYLNAVVAKAILGKYPQLAPEFVYGDYPKYNSFKERQKATQKMLFYSNILKFFKDQESLHVNSDGEEIWNANKHLPIIKNVLSIPQVNIVKKTEVQTGGFYKESILSKGNSDKLIPRKNNWDTRKYGGFDSPTVAYSVLVIAKMEKGKAKVLKPVKEMVGITIMERTAFEENPVVFLEARGYREIQEHLIIKLPKYSLFELENGRRRLLASASELQKGNELFLPVDYMTFLYLAAHYHELTGSSEDVLRKKYFVDRHLHYFDDIIQMINDFAERHILASSNLEKINHTYHNNSDLPVNERAENIINVFTFVALGAPAAFKFFDATIDRKRYTSTKEVLNATLIHQSVTGLYETRIDLSQLGEN

SEQ ID NO: 77 - protein, 1341 aa, Ruminococcus lactaris
MGKGYYVGLDMGTGSVGWAVTDESYQILRRHGKAMWGVRLFESAKTAEERRMFRTGRRRLDRRGWRIEILQEIFAEEISRVDPGFFLRMKESKYYPEDKRDIQGNCPELPYTLFVDKTFTDKDFHKKYPTIYHLRKMLMETEDTPDMRLVYLALHHMMKHRGHFLLSGDISQVTEFKNTFNQFIENIRNEEMDFEIELDESAVQMIEETLKDKNLTRSAKKSKLVKGLNAKNVRDKAFLTLLSGGTVKLSDLFGMEELNEGERPKISFADNGYEEYAAVVEMELGELYYIVESAKAVYDWAILSDILGGSTSVSDAKVRAYEKHKADLKYLKAVVKEYFPKEVYNAVFVESSDKLNNYPAYIGMTKKNGKKVSLEGKRCSREEFMDFLKKNIVVKLPDEEAKMYLQSELEKDSFLPKQVNKDNGVIPYQVHKYELKKILDNLGDKIPFLKENAEKIEKLFSFRIPYYVGPLRTGNGENSKFAWAERKSTEKIYPWNFENVIDVEQSAENFIRRMTNKCTYLIGEDVLPKDSLLYSKFMVLNELNNLRLDGQKISVELKQKIYRDVFCRSRKVTQKKLKSYLIREGIAGKNVELTGIDGDFKGSLTAYHDFKEKLIDVELTQKEKEEIILNIVLFGDDKKLLKQRLKKKFPQLTEKQINTVTALSYKGWGRLSKKLLEEVTVPAPETGEVWNIITALWETNDNFMQLLSKEYQFSDRIEEFNEEKADPEVSYQTIEDLYVSPAVKRQIWQTLQIIQEIEKVMGEKPKRVFVEMAREKQENKRTESRKKTLSDLYTKCKKEEPEWIEALCTSLEKHEEHQLRSDKLYLYYTQKGRCMYSGEPIDLEDLWDNTKYDIDHIYPQSKTMDDSLKNRVLVKKEYNAKKSDTYPIAADIQKKMMPFWKSLLTGGFIPKEKYDRLVRNNPLDANELAGFIERQIVETRQSTKAVAEILKKILPDTEIVYVKAKTVSKFRQDFDFIKVRDMNDLHHAKDAYLNIVVGNVYFVKFTKNAAWFVKENPGRTYNLEKMFIWDVARDGEIAWKAGKSGSIVQVRAMMEKNHILVTRRSYEVKGGLFDQQILKKGKGQVPVKESDERLRDIGKYGGYNKAAGVYFMLVSSKDKKGKEQRTIEFVPIYLKDRVEKDMESARNYLMEERGLREPKILIKKIKIDTLFKVDGFYMWLSGRTSNQLIFKGANQLILSKEDMKTLKKVVKYIQRQKEDKNVKISMRDGITEEELLKLYETFLDKIRHSIYGARLSSQEKTLVNGKEKFIDLSVEAKCQVLYEILHLFQCQSGAANLKMIGGPASAGILVMNNNISKCKNISIVNQSPTGIYEKEIDLLRV

SEQ ID NO: 78 - protein, 1003 aa, Gluconacetobacter diazotrophicus
MIDESLTFGIDLGIGSCGWAVLRRPSAFGRKGVIEGMGSWCFDVPETSKERTPTNQIRRSNRLLRRVIRRRRNRMAAIRRLLHAAGLLPSTDSDALKRPGHDPWELRARGLDKPLKPVEFAVVLGHIAKRRGFKSAAKRKATNISSDDKKMLTALEATRERLGRYRTVGEMFARDPDFASRRRNREGKYDRTTARDDLEHEVHALFAAQRRLGQGFASPELEEAFTASAFHQRPMQDSERLVGFCPFERTEKRAAKLTPSFERFRLLARLLNLRITTPDGERPLTVDEIALVTRDLGKTAKLSIKRVRTLIGLEDNQRFTTIRPEDEDRDIVARTGGAMTGTATLRKALGEALWTDMQERPEQLDAIVQVLSFFEANETITEKLREIGLTLAVLDVLLTALDAGVFAKFKGAAHISTKAARNLLPHLEQGRRYDEACTMAGYDHAASRLSHHGQIVAKTQFNALVTEIGESIANPIARKALIEGLKQIWAMRNHWGLPGSIHVELARDVGNSIEKRREIEKHIEKNTALRARERREVHDLLDLEDVNGDTLLRYRLWKEQGGKCLYTGKAIHIRQIAATDNSVQVDHILPWSRFGDDSFNNKTLCLASANQQKKRSTPYEWLSGQTGDAWNAFVQRIETNKELRGFKKRNYLLKNAKEAEEKFRSRNLNDTRYAARLFAEAVKLLYAFGERQEKGGNRRVFTRPGALTAALRQAWGVESLKKQDGKRINDDRHHALDALTVAAVDEAEIQRLTKSFHEWEQQGLGRPLRRVEPPWESFRADVEATYPEVFVARPERRRARGEGHAATIRQVKERECTPIVFERKAVSSLKEADLERIKDGERNEAIVEAIRSWIATGRPADAPPRSPRGDIITKIRLATTIKAAVPVRGGTAGRGEMVRADVFSKPNRRGKDEWYLVPVYPHQIMNRKAWPKPPMRSIVANKDEDEWTEVGPEHQFRFSLYPRSNIEIIRPSGEVIEGYFVGLHRNTGALIPTPVGPDSYVIA

SEQ ID NO: 79 - protein, 1368 aa, Streptococcus pyogenes
MDKKYSIGLDIGTNSVGWAVITDDYKVPSKKFKVLGNTDRHSIKKNLIGALLFDSGETAEATRLKRTARRRYTRRKNRICYLQEIFSNEIAKVDDSFFHRLEESFLVEEDKKHERHPIFGNIVDEVAYHEKYPTIYHLRKKLADSTDKADLRLIYLALAHMIKFRGHFLIEGDLNPDNSDVDKLFIQLVQTYNQLFEENPINASRVDAKAILSARLSKSRRLENLIAQLPGEKRNGLFGNLIALSLGLTPNFKSNFDLAEDAKLQLSKDTYDDDLDNLLAQIGDQYADLFLAAKNLSDAILLSDILRVNTEITKAPLSASMIKRYDEHHQDLTLLKALVRQQLPEKYKEIFFDQSKNGYAGYIDGGASQEEFYKFIKPILEKMDGTEELLAKLNREDLLRKQRTFDNGSIPHQIHLGELHAILRRQEDFYPFLKDNREKIEKILTFRIPYYVGPLARGNSRFAWMTRKSEETITPWNFEEVVDKGASAQSFIERMTNFDKNLPNEKVLPKHSLLYEYFTVYNELTKVKYVTEGMRKPAFLSGEQKKAIVDLLFKTNRKVTVKQLKEDYFKKIECFDSVEISGVEDRFNASLGTYHDLLKIIKDKDFLDNEENEDILEDIVLTLTLFEDREMIEERLKTYAHLFDDKVMKQLKRRRYTGWGRLSRKLINGIRDKQSGKTILDFLKSDGFANRNFMQLIHDDSLTFKEDLQKAQVSGQGDSLHEHIANLAGSPAIKKGILQTVKVVDELVKVMGRHKPENIVIEMARENQTTQKGQKNSRERMKRIEEGIKELGSDILKEYPVETTQLQNEKLYLYYLQNGRDMYVDQELDINRLSDYDVDHIVPQSFLKDDSIDNKVLTRSDKNRGKSDNVPSEEVVKKMKNYWKQLLNAKLITQRKFDNLTKAERGGLSELDKAGFIKRQLVETRQITKHVAQILDSRMNTKYDENDKLIREVRVITLKSKLVSDFRKDFQFYKVREINNYHHAHDAYLNAVVGTALIKKYPKLESEFVYGDYKVYDIRKMIAKSEQEIGKATAKYFFYSNIMNFFKTEITLANGEIRKRPLIETNGETGEIVWDKGRDFATVRKVLSMPQVNIVKKTEVQTGGFSKESILPKRNSDKLIARKKDWDPKKYGGFDSPTVAYSVLVVAKVEKGKSKKLKSVKELVGITIMERSSFEKDPVDFLEAKGYKEVRKDLIIKLPKYSLFELENGRKRMLASAGELQKGNELALPSKYVNFLYLASHYEKLKGSPEDNEQKQLFVEQHKHYLDEIIEQISEFSKRVILADANLDKVLSAYNKHRDKPIREQAENIIHLFTLTNLGAPAAFKCFDTTIGRNRYKSIKEVLDATLIHQSITGLYETRIDLSQLGGD

SEQ ID NO: 80 - protein, 1504 aa, Bacteroides dorei
MKNIVGLDLGTNSIGWAVVNGSVNDDGSEQLVKIQASGSRIIPMDAAMIGDFNKGNSISQTAERTRLRGVRRLSERYLLRRERLHRILDILGFLPFHFAQDLDRHGKIVKGKEPKLAWRKNEAGQFEFIFQDSFKEMLEDFKLNYPNLITDDKKVPYDWTIYYLRKKGLTSKISKEELAWILLNFNQKRGYYQLRGEEEEENKDKLVEFYALKVVAVEDSGEKKGKDIWYNVHLENGWVYRRTSNMSLDWVGKTKEFIVTTDLEKDGTPKKDKEGNVKRSFRAPKEDDWSLVKKKTEADIDQTHKTVGAYIYDTLLGNPSQKIRGRLVRTIERKYYKEELKLILEKQKEFHLELQDRALYAACIEELYPINEAHRNNVGNRDFTYLFLEDILFYQRPLKSKKSLIDNCPYEENQGLDKETGEIKSFPVKCIAKSHPLFQEFRLWQFIINLRIYRKDLAQDVDVTNELLKTEEDYVALFDWLNGKKEIDQKAFLKYPVFGLKKEIENYRWNYVQDKPYPCNETRSLMLARLEKCDISIEFLTKENEEALWHILYSVEDKNEIVKALQKFADKHDLNASFVDVFQKFPPFKKEYGSYSAKAIKKLLPLMRMGKYWSENSIDKGTRERIDKIITGEYDEKIENRVREKAIHLADVSDFKGLPLWLVCYIVYGRHSEAKEIIQWKSPADIDSYLRSFKQHSLRNPIVEQIIIETLRVVRDIWKQVGNIDEIHVELGREMKNPADKRKKMTQQMSENENTNLRIKYLLTEFLNPEYEVENVRPYSPSQQDILRIYEEGVLNSVSDLPEEISDILKKFTETDLKKRPSRSEVLRYKLWLEQKYRSPYTGEVIPLGKLFTPAYEIEHVIPQSYYFDDSFSNKVICEAEVNKLKSNLLGHEFIVKHHGEIVELPFGKKVRIFTVDEYEQFVKDNYSRTRSKMKKLLMDDIPEEFVTRQLNDSRYISKVVKSLLSNIVREKGEEEAISKNVIPCTGGVTDRLKKDWGINEVWNKIILPRFQRLNELTGTNKFTTKNVGIQEIPTMPLELQKGFNKKRIDHRHHAMDAIIIACANRNIINYLNNKSATAKAELSRYDLQKMLCDKAKTDNNGNYKWVIRKPWASFTQDTYLALENIIVSFKQNLRVINKATNRFLHYNEEGKKIFVKQGKGDNWAIRKSMHKDTVFGEVNLRRIKTVALNEAMKNPQSIVVKDFKRKLLELWNLGFDAKRIKKYFEDNRETWSDINLSKIEVYYFSKDTKDRFFATRKPLDTSFDRKKIENNITDTGIQKILLRHLELKDNNPDIAFSPDGIDEMNRNIIQLNNGKYHQPIIKIRWYEQADKFAVGQTGNKSSKFVEAAKGTNLFFAVYESNILDKKTNTIIKKRNYATIPLNVAIERQKQGLPVAPEDENGNDPIFVLSPNDLVYLPTDDELANGIIAQPLDRGRIYKMVSSSGEQCFFIKHIVANVLVDKFEFSPLNKMERALTGEMIKMICIPIKVDRLGNVLESSSSYKK

SEQ ID NO: 81 - protein, 1426 aa, Capnocytophaga sputigena
MKNILGLDLGITSISFAHIVEDENKEKSEIKELGVRIVSLTTDEQSDFEKGKSITTNANRTLKHGARLNLDRYQQRRKYLIDLLQKANLITSSSILAENGKNTTHSTWQLRAKAVTERIEKEEFARVLLAINKKRGYKSSRKAKTEDEGQAIDGMAIAKRLYDENLTPGQLSLQLLQQNKKLLPDFYRSDLQREFDLVWNFQKQFYPDILTDSFYKELQGKGKDATSKAFSKRYHFDTAENKGSKESVRLQAYQWRAEAISKQLSKEEVAYVLTEINNNLNNASGYLGAISDRSKELYFNRQTVGQYLYAQLQENRHNSLKNKVFYRQDYLDEFERIWETQASFHKELTDELKKQIRDVVIFYQRKLKSQKGLISFCEFESKEIEIEKDGKTITKTIGARVVPKSSPLFQEFKIWQILNNVTCKRKGIRKKKSSAKSTELDLFNEPSQTIFSLDMECKQLLFDELNLKGDLKSDKVLKLLGYSPQEWEINYNQLEGNRTQKALYEAYLKIVEMEAHDVKDILQIKSAKDDWSLDESPLSASEIKEKVKDIFQALGICTKILYFDPLLPVKEFEKQDSYQLWHLLYSYESDDSTSGNETLYRILEKKYAFKREHARILANVALQDDYGSLSTKAIRKIYPNIKENQYSKACELAGYKHSKLSLTTEELEARELKNIIPLLKKNALRNPVVEKILNQMINVVNALIEKNSERDAEGKITKYFHFDEIRIELARELKKNAQKRYEMTQNINKAKLEHQKISEILQKKFGIKNPTKSDIIRYRLYQELEHNGYKELYTNAPIARDMLFSKNIEIEHIVPKARVFDDSFSNKTLTFHRINSNKGEYTAFDYITSLNSEEELNQYLTRVENAYKTKSISLTKYKNLLKKASEIGDGFINRDLRDTQYIAKKAKEILFQVTKNVLSTSGSITDRLREDWGLVDVMKELNMPKYQSLGLTEVEERKEGNKVTVIKNWTKRNDHRHHAMDALTVAFTKPSYIQYLNHLNARKDENNKNYSVILAIEEKETIKVPTNNGKNKRVFIEPIPNFRQVAKKHLEEIFISHKAKNKVVTKNVNKPAGTDKQQITLTPRGQLHKETIYGKYQYYVNKEEKVGVKFDERTITKVSNPLYREALLKRLQANDNDPKKAFTGKNALSKNPIYLDETKTKTLPEKVNLTYLEEDFSIRKDISPDNFKDLKSIEKVIDQGVKRILIKRLQDYDNDPKKAFVDLEKNPIWLNKEKGIAIKRVTISGVSNAQPLHIGKDHLGKTTLNKEGNEIPVDYVSTGNNHHVAIYRDKEGNLQEQIVSFFEAVVRTQQGLPIIDKTYKQEEGWQFLFTMKQNEMFVFPNATTGFNPAEIDLLDPKNKKLISPNLFRVQKIATKDYFFRHHLETNVETDNVLKNTTWKREGLSGLKDIVKVRINHLGDIVSIGEY

SEQ ID NO: 82 - protein, 1443 aa, Parabacteroides johnsonii
MIKLLYLEKLKQYTMKKILGLDLGTSSIGWALVNEAENSDEVSSIIKLGVRVNPLTVDEMQNFEKGKSITTNADRTLKRSMRRNLQRYKLRRDALIELLKKVGFITDKTILSEQGNRTTFETYRLRAKAAEEEISLKELARVLLMINKKRGYKSSRKAKGEEEGALIDGMEIAKKLYDEDLTPGQLCLQLLESGKKFFPDFYRSDLQEEFNKIWDFQKQFNLFSFCDVAKEEVKGKNKSQTWAILAKYFVETKKVNVWNEHEAQTENREEVYKLVGLKRTVKGEELKKENYRWRVQALTEQLDLEKIAVVLQEINGQISASSGYLGAISDRSKVLYFNRQTVGQYQMAELNKNPNMSLRNMVFYRQDYLDEFNVIWEKQAEFHKELTPELKKEIRDIIIFYQRRLKSQKGLISFCEFENREVVVEKEGKKQTKIIGCKVIPRSHPLFQEFKIWQTLNNIEVFVGEKKGKRKKSNVSSDLFGDTEDALITEGRRFLYQEEKKILAKELSIKKGLTKAEILRLLFENPQELDINFKQIDGNQTGFALFSAYSNMIEKYGYEPLDFKKPAEDLISQLKTVFTDLGWNTDLLFIDLDKENKEWEKQPYFRLWHLLYSFEGDNTPTGNGKLIEKIMQLCGIEKEYAIELANVSLQDDYGSLSAKAIKKILLYLKEGNQYDMACEYAGYRHSKSSLTKEEIENKVLKDKLEILPKNSLRNPVVEKILNQMVNVINTVMEVYGRPDEIRVELARELKKSAKEREELTKAVAKNTREHEEIRKVLQSEFGMINVSRNDIIRYKLYEELKDNGYKTLYSNQYIPREKLFSKEIDIEHIIPQSRLFDDSLSNKTLEYKSINIEKGNKTAYDFVKEKYGEEGLQQYLNRCENLCKDKKAKLRKLKMELNEIPDGFIDRDLRNTQYIAKKALSMLTEICRRVVATTGSITDKLREDWQLVDVMKELNLPKYEALGLVEVYEDKDGRKIKRIKDWTKRNDHRHHAMDALTVAFTKDVFIQYFNNKNAAWESDSKEHTNIVGIKTRYFESGKAVPPIPLGQFRVEAKCHLENLLVSIKAKNKVVTTNVNCIKKKGGTYKNTQQTPRGQLHLETIYGSHNQYVTKIEKVNASFDAVKIATVSKQDYRNALLKRLEVFGNDPKKAFTGKNSLEKNPIYLDRAQTIQVPDKVQTVELETAYTIRKPVDPTLNVDKVVDKKIRLILEQRLKEYGGDAKKAFVNLDENPIWLNEEKGISIKRVTIRGISKAQALHDKKDKDGNFILDETGKRIPVDFVNTGNNHHVAIYRKPVLDKKGQVIFDDEGNPMYELDEDVVPFFEAVTRANLGIPIIDKDYKKSEGWQFLFSMKQNEYFVFPNEKTGFNPKEVDLLDPDNYAMISPNLFRVQKIGLNDYTFRHHLETTIQNDLKFITWIRCGKSGIKDIVKVRINHIGQIVSVGEY

SEQ ID NO: 83 - protein, 984 aa, Campylobacter jejuni
MARILAFDIGISSIGWAFSENDELKDCGVRIFTKVENPKTGESLALPRRLARSARKRLARRKARLNHLKHLIANEFKLNYEDYQSFDESLAKAYKGSLISPYELRFRALNELLSKQDFARVILHIAKRRGYDDIKNSDDKEKGAILKAIKQNEEKLANYQSVGEYLYKEYFQKFKENSKEFTNVRNKKESYERCIAQSFLKDELKLIFKKQREFGFSFSKKFEEEVLSVAFYKRALKDFSHLVGNCSFFTDEKRAPKNSPLAFMFVALTRIINLLNNLKNTEGILYTKDDLNALLNEVLKNGTLTYKQTKKLLGLSDDYEFKGEKGTYFIEFKKYKEFIKALGEHNLSQDDLNEIAKDITLIKDEIKLKKALAKYDLNQNQIDSLSKLEFKDHLNISFKALKLVTPLMLEGKKYDEACNELNLKVAINEDKKDFLPAFNETYYKDEVTNPVVLRAIKEYRKVLNALLKKYGKVHKINIELAREVGKNHSQRAKIEKEQNENYKAKKDAELECEKLGLKINSKNILKLRLFKEQKEFCAYSGEKIKISDLQDEKMLEIDHIYPYSRSFDDSYMNKVLVFTKQNQEKLNQTPFEAFGNDSAKWQKIEVLAKNLPTKKQKRILDKNYKDKEQKNFKDRNLNDTRYIARLVLNYTKDYLDFLPLSDDENTKLNDTQKGSKVHVEAKSGMLTSALRHTWGFSAKDRNNHLHHAIDAVIIAYANNSIVKAFSDFKKEQESNSAELYAKKISELDYKNKRKFFEPFSGFRQKVLDKIDEIFVSKPERKKPSGALHEETFRKEEEFYQSYGGKEGVLKALELGKIRKVNGKIVKNGDMFRVDIFKHKKTNKFYAVPIYTMDFALKVLPNKAVARSKKGEIKDWILMDENYEFCFSLYKDSLILIQTKDMQEPEFVYYNAFTSSTVSLIVSKHDNKFETLSKNQKILFKNANEKEVIAKSIGIQNLKVFEKYIVSALGEVTKAEFRQREDFKK

SEQ ID NO: 84 - protein, 1082 aa, Neisseria meningitidis
MAAFKPNPINYILGLDIGIASVGWAMVEIDEDENPICLIDLGVRVFERAEVPKTGDSLAMARRLARSVRRLTRRRAHRLLRARRLLKREGVLQAADFDENGLIKSLPNTPWQLRAAALDRKLTPLEWSAVLLHLIKHRGYLSQRKNEGETADKELGALLKGVADNAHALQTGDFRTPAELALNKFEKESGHIRNQRGDYSHTFSRKDLQAELILLFEKQKEFGNPHVSGGLKEGIETLLMTQRPALSGDAVQKMLGHCTFEPAEPKAAKNTYTAERFIWLTKLNNLRILEQGSERPLTDTERATLMDEPYRKSKLTYAQARKLLGLEDTAFFKGLRYGKDNAEASTLMEMKAYHAISRALEKEGLKDKKSPLNLSPELQDEIGTAFSLFKTDEDITGRLKDRIQPEILEALLKHISFDKFVQISLKALRRIVPLMEQGKRYDEACAEIYGDHYGKKNTEEKIYLPPIPADEIRNPVVLRALSQARKVINGVVRRYGSPARIHIETAREVGKSFKDRKEIEKRQEENRKDREKAAAKFREYFPNFVGEPKSKDILKLRLYEQQHGKCLYSGKEINLGRLNEKGYVEIDHALPFSRTWDDSFNNKVLVLGSENQNKGNQTPYEYFNGKDNSREWQEFKARVETSRFPRSKKQRILLQKFDEDGFKERNLNDTRYVNRFLCQFVADRMRLTGKGKKRVFASNGQITNLLRGFWGLRKVRAENDRHHALDAVVVACSTVAMQQKITRFVRYKEMNAFDGKTIDKETGEVLHQKTHFPQPWEFFAQEVMIRVFGKPDGKPEFEEADTPEKLRTLLAEKLSSRPEAVHEYVTPLFVSRAPNRKMSGQGHMETVKSAKRLDEGVSVLRVPLTQLKLKDLEKMVNREREPKLYEALKARLEAHKDDPAKAFAEPFYKYDKAGNRTQQVKAVRVEQVQKTGVWVRNHNGIADNATMVRVDVFEKGDKYYLVPIYSWQVAKGILPDRAVVQGKDEEDWQLIDDSFNFKFSLHPNDLVEVITKKARMFGYFASCHRGTGNINIRIHDLDHKIGKNGILEGIGVKTALSFQKYQIDELGKEIRPCRLKKRPPVR

SEQ ID NO: 85 - protein, 1021 aa, Clostridium cellulolyticum
MKYTLGLDVGIASVGWAVIDKDNNKIIDLGVRCFDKAEESKTGESLATARRIARGMRRRISRRSQRLRLVKKLFVQYEIIKDSSEFNRIFDTSRDGWKDPWELRYNALSRILKPYELVQVLTHITKRRGFKSNRKEDLSTTKEGVVITSIKNNSEMLRTKNYRTIGEMIFMETPENSNKRNKVDEYIHTIAREDLLNEIKYIFSIQRKLGSPFVTEKLEHDFLNIWEFQRPFASGDSILSKVGKCTLLKEELRAPTSCYTSEYFGLLQSINNLVLVEDNNTLTLNNDQRAKIIEYAHFKNEIKYSEIRKLLDIEPEILFKAHNLTHKNPSGNNESKKFYEMKSYHKLKSTLPTDIWGKLHSNKESLDNLFYCLTVYKNDNEIKDYLQANNLDYLIEYIAKLPTFNKFKHLSLVAMKRIIPFMEKGYKYSDACNMAELDFTGSSKLEKCNKLTVEPIIENVTNPVVIRALTQARKVINAIIQKYGLPYMVNIELAREAGMTRQDRDNLKKEHENNRKAREKISDLIRQNGRVASGLDILKWRLWEDQGGRCAYSGKPIPVCDLLNDSLTQIDHIYPYSRSMDDSYMNKVLVLTDENQNKRSYTPYEVWGSTEKWEDFEARIYSMHLPQSKEKRLLNRNFITKDLDSFISRNLNDTRYISRFLKNYIESYLQFSNDSPKSCVVCVNGQCTAQLRSRWGLNKNREESDLHHALDAAVIACADRKIIKEITNYYNERENHNYKVKYPLPWHSFRQDLMETLAGVFISRAPRRKITGPAHDETIRSPKHFNKGLTSVKIPLTTVTLEKLETMVKNTKGGISDKAVYNVLKNRLIEHNNKPLKAFAEKIYKPLKNGTNGAIIRSIRVETPSYTGVFRNEGKGISDNSLMVRVDVFKKKDKYYLVPIYVAHMIKKELPSKAIVPLKPESQWELIDSTHEFLFSLYQNDYLVIKTKKGITEGYYRSCHRGTGSLSLMPHFANNKNVKIDIGVRTAISIEKYNVDILGNKSIVKGEPRRGMEKYNSFKSN

SEQ ID NO: 86 - protein, 1131 aa, Acidovorax ebreus
MAQHVFGLDIGIASVGWAILGEQRIIDLGVRCFDKAETAKEGDPLNLTRRQARLLRRRLYRRAWRLTQLSRLLKRKGLIADAKLFAKAPSYGDSAWELRRQGLDRLLTPLEWARVIYHQCKHRGFHWTSKAEEAKADSDAEGGRVKQGLAHTKALMQAKNYRSAAEMVLAEFPDAQRNKRGQYDKALSRVLLGEELALLFATQRRLGNPHASDFFEKLILGDGDRKSGLFWQQKPALSGADLLKMLGKCTFEKGEYRAPKASFSVERHVWLTRLNNLRIVVDGRSRPLNEAERQAALLLPYQTETSKYKTLKNAFIKAGLWGDGVRFGGLAYPSQAQIDAEKTKDPEDQFLVKLPAWHELRKAFKAAGHEALWQQISTPALDGDPTLLDQIATVLSVYKDGAEVVQQLRQLALPEPAASIAVLEKISFDKFSSLSLKALRRIVPLMQSGLRYDEAVAQIPEYGHHSQRIEPGAAKHLYLPPFYEAQRKYAGKGDHIGSMQFRDDADIPRNPVVLRALNQARKVVNALIREYGSPIAVNIEMARDLSRPLDERNKVKRAQEEFRDRNDRARSEFERDFGYKPKAAAFEKWMLYREQLGQCAYSQQPLDIQRVLDDHNYAQVDHALPYSRSYDDSKNNKVLVLTHENQNKGNRTAFEYLTSFPDGEDGERWRTFVAWVQGNKAYRMAKRNRLLRKNYGVDESKGFIDRNLNDTRYICKFFKNYVEEHLQLAARADGDTARRCVVVNGQLTAFLRARWGLTKVRGDSDRHHALDAAVVAACTHGMVKALADYSRRKEISFLQEGFPDPETGEILNPAAFDRARQHFPEPWTHFAHELKARLFTDDLAALREDMQRLGSYTTEDLGRLRTLFVSRAPQRRSGGAVHKETIYAQPESLKQQGGVIEKILLTSLKLQDFDKLLNPESNDHFVEPHRNERLYAAIRQRLEQFGGRADKAFGPDNLFHKPDKNNQPTGPVVRSIKLVRGKQTGIPIRGGLAKNDSMLRVDIFTKAGKFHLVPVYVHHRVTGLPNRAIVAFKDEDEWTLIDESFAFLFSVYPNDYVKVTLKKEQQSGYYSGADRSTGAMNLWAHDRAASVGKDGLIRGIGVKTALSVEKFNVDVLGRIYLAPPETRSGLA

SEQ ID NO: 87 - protein, 1122 aa, Streptococcus suis
MSNGKILGLDIGIASVGVGVIDAQTGEIIHASSRIFPSANAANNAERRTFRGSRRLIRRKKHRIKRLDDLFNDFHINLDGEMSTDNPYVLRVKGLSQKLTVEELYISIKNIMKRRGISYLDDAESDNEAGRSDYAKAIERNRQLLTSKTPGEIQLERLEKYGQLRGNFTIIDEEGQSQQIINVFSTSDYVKEVEKILDCQKMYHKFISDEFCDKLIELLREKRKYYVGPGNEKSRTDYGIYRTDGTTLENLFGILIGKCTFYPDQYRSSRASYTAQEFNFLNDLNNLTVPTETKKLSQEQKEFLVNYAKETSVLGAGKILQQIAKLADCKVEDIRGYRLDNKDKPELHTFETYRAMKGLVPLVDIGVLSREQLDILADILTLNTDFEGIREALKKQLPNVFDEKQVKGLASFRKSKSQLFAKGWHNLSQKIMLEVIPELYATSDEQMTILTRLGKFEKSSVAEYPSSINVDEITDEIYNPVVAKSIRQTIKIINASIKKWGEFDQIVIEMPRDRNEDEEKKRIADGQKANAKEKADSILRAAELYCAGKVLPDYVYNGHNQLATKIRLWYQQGERCIYTGQPISIHDLIHNQNQYEIDHILPLSLTFDDSLSNKVLVLATANQEKAQRTPYNYLKSATSAWSYREFKDYVTKRKGIGKKKCEYLTFEEDINGFEVRSKFIQRNLVDTRYASKVILNALQDYFKISGIQTKVSVVRGQFTSQLRHKWGIEKTRETYHHHAVDALIIAASSQLRLWKKQESPLVVDYQEGRQVDLETGEILELTDEQYKELVYQPPYQGFVNTISSSAFDNEILFSYQVDSKVNRKISDATIYATRNAQLGKDKTEGIYVLGKIKDIYTQAGYEAFLKRYTKDKTSFLMYHKDLDTWEKVIEIILRDYREYDEKGKEIGNPFERYRRENGYVKKYSRKGNGTAIKSLKYYDNKLGNHIDITPENSRNAVVLQSLKPWRTDVYFNKETGKYEFLGIKYSDLSFEKGTGEYGISQEKYDSIKIAEGVAKKSIFKFTLYKQDLLFIKDIENNFGKLLRFTSKNDTSKHYVELKPYDKNKFGTEEPLLPVLGNVAKSGQCIKGLNKSNISIYKVRTDILGYRHFIKQEGEHPQLKFKK

SEQ ID NO: 88 - protein, 1509 aa, Bacteroides coprophilus
MKKTLGLDLGTNSIGWAVINSNIDSEGKEKLVGISSCGSRIIPMDATTLGDFGKGNTKSPVAERTRLRGIRRLLERSLLRRERLHRVLSVMGFLPEHYASQLDRYGKFLPETEPKLAWYKDDSGRYQFLFQKSFHEMLEDFRQHQPELVAGEKKIPYDWTIYYLRKKALSQEITKEELAWILLNFNQKRGYYQLRGEEEQEENNKSVEYHALKVVSVEDSGERKGKDIWYNVTLENGWVYRRASNIPLDWTGKVKEFVVTTELDDAGNPKKDKEGNVKRSFRAPKEDDWGLLKTRTQAQIDESGKTVGTYIYESLLCMPNQKIRGKLVRTIERKYYKDELRQILVKQSEFHAALQDHNLLLSCIEELYPNNEAHRRLLSASSFIYFLIEDILFYQRPLKSQKGLIDNCPYESHIYKDKKDGSLHHVPLKCVSKSHPLFQEFRLWQFLSNLRIYQRERMMDGSLKLDVDVTREFLPSEEDYVKLFDWLNERKEISQKFLLAYKPFGLKKNEQANYRWNYVEDKSYPCNETRAEIKSRLSKAGVPEEFLTEEKEEALWHILYSISDKKELTKALGTFAAKNCLNESFVEVFAKIPPFESNYAAYSLKAIRKLLALMRMGKYWNEQAIDRQTRDRIEKILTGEYDETIRSRVREKAMLLTDISSFRGLPLWLACYIVYDRHSESKELVKWETPADIDHFLSKFKQNSLRNPIVEQVITESLRTVRDIWKQEGKIDEIHVELGREMKNPAKERARITAQVQENENTNLRIKALLAEFMNPEFEIENVHPYSPGQQEILRIYEDGVLSGIAEKDLPDDITAILKKFRENDVKKRPTTSEVLRYKLWLEQRYRSPYTGRVIPLGKLFTPAYEIEHVIPQSRYFDDSISNKVICESAVNKLKDNCLGYEFIKKHSGEMVELGNGETVPVFSVEEYERFVKESYFGNSKKMKKLLLEDIPDSFIERQLNDSRYISRVVTSLLSNLVCEEGEQDGLSKNVIVCTGGITDRLKKDWGVQEVWNRIILPRFLRLNEITGRTDFTSTSVNGHLLPALPLYLQKGFNKKRIDHRHHAMDAIVIACANRNIVNYLNNSSARKNSEISRYDLQRLLCEKVKTDANGNYKWILRKPWETFTQDVYAALTNIVVSFKQNLRVINRTTNYYQHYNEAGEKRMIPQTKGDRWAIRKPMHKDTVYGEVNLRKEKTLPLRDVVKNPSIVVDKSLKNKLYELLKSQYDLKAIAKYFETHQDVWADVNLKKIKVYYFTKETNERFFATRKSLDPSFDQKKIEEEVTDTGVQKILLHHLQQNNNDPDMAFSPDGIDRMNQNMTILNDGKWHQPIYKVRTYEKADKFAVGESGNKAKKFVEAAKGTNLFFAVYESVQEDEAIGKQVCKRTFATIPLNEVIKRKKQGLPAAPEDLNGNLPKFVLSPNDLVYLPTEEERNSSRIIQPLDRERIYKMVSSSGSQCFFIKVFVANSIWDKNEYSSLNKMERAITNEMIKEICVPIKIDRLGNVSLIQI

SEQ ID NO: 89 - protein, 1219 aa, Bacteroides cellulosilyticus
MKEEVRGKNRSQTWAILAKFFVWSEKESVWNEKEARTEERVKEYKLVGLKRDTKGNELKLENYRWRVQALSEQLNPEIVAIVLQEINGQISASSGYLGAISDRSKQLYFNRQTVGQYLMSELEKDPNVSLRNRVFYRQDYLDEFDRIWEKQAEFHEELTVELKKEIRDIIIFYQRRLKSQKGLISFCEFEKREVVVEEDGRKKNKTVGCRVIPRSHPLFQEFKIWQTLNDIEVFAWDKQSKRKKADKSSILFDNSEDALLVEGKRFLYQEEKELLAKELFVKESMKKAEVLKLLFENYQELDLNFKQIDGNHTGFALFSAYSKMIEKYGYEPVDFKRSADEIIEKLETIFTNLGWNTELLSIDLSKEDKELERQSYFRLWHLLYSFEGDNTPTGNGKLLEKIMQLCDVEKEYAVELANVSFQEDYGSLSAKAIKKILPYLKEGNQYDVACDYAGYRHSRSSLTKDEIENKILKDKLEILPKNSLRNPVVEKILNQMVNLINTLIDTYGKPDEIRVELARELKKNAKEREELTKSIARNTREHDEIRQLLRTEFGMMNVSRNDIIRYKLYEELKDNGYKTLYSNEYIPREKIFSKEIDIEHVIPQARLFDDSLSNKTLEYRAINIEKGNKTAYDFVKEKYGNDGLEKFLNRCETLFKDKRTKLRKLKMEEKDIPEGFIDRDLRNTQYISKKAFAMLNEISRRVVATTGSITDKLREDWQLVDLMKELNLPKYEKLGMVEMFEDKDGRKIKKITDWTKRNDHRHHAVDALTVAFTKDVFIQFYNNKNAAWMPASKEHANITGIKARYFENGKALAPMPLAQFRAEAKRHLENLLVSIKAKNKVITSNVNRTKNKNGENRKLQQTPRGQLHLETVYGSHRQYATKIEKVNAAFDVTKIATVSKLAYRNALLKRLEAFGNDPKKAFTGKNTLEKNPLYLDENQTEMVPEKVQTVEFETVYTIRKPIDPNLSIDKVVDVKIRSVLEKRLKEYGGDAKKAFVNLDENPIWLNEAKGISIKRVSIRGISNAQSLHEKKDKDGNLILGKEGRKIPVDFVNTGNNHHVAIYKKPVLDKVGQVVLDEEGNPKYELDEVVVSFFDAVTRANLGQPIIDKDYRRSEGWQFLFSMKQNEYFVFPNDKTGFNPKEVDLLNPENYALISPNLFRVQKFAYKNYVFRHHLETTIKDTSSTLKGITWTDFRSSKGLDKIVKVRVDHIGQIVSIGEY

SEQ ID NO: 90 - protein, 1329 aa, Catenibacterium mitsuokai
IVDYCIGLDLGTGSVGWAVVDMNHRLMKRNGKHLWGSRLFSNAETAANRRASRSIRRRYNKRRERIRLLRAILQDMVLEKDPTFFIRLEHTSFLDEEDKAKYLGTDYKDNYNLFIDEDFNDYTYYHKYPTIYHLRKALCESTEKADPRLIYLALHHIVKYRGNFLYEGQKFNMDASNIEDKLSDIFTQFTSFNNIPYEDDEKKNLEILEILKKPLSKKAKVDEVMTLIAPEKDYKSAFKELVTGIAGNKMNVTKMILCEPIKQGDSEIKLKFSDSNYDDQFSEVEKDLGEYVEFVDALHNVYSWVELQTIMGATHTDNASISEAMVSRYNKHHDDLKLLKDCIKNNVPNKYFDMFRNDSEKSKGYYNYINRPSKAPVDEFYKYVKKCIEKVDTPEAKQILNDIELENFLLKQNSRTNGSVPYQMQLDEMIKIIDNQAEYYPILKEKREQLLSILTFRIPYYFGPLNETSEHAWIKRLEGKENQRILPWNYQDIVDVDATAEGFIKRMRSYCTYFPDEEVLPKNSLIVSKYEVYNELNKIRVDDKLLEVDVKNDIYNELFMKNKTVTEKKLKNWLVNNQCCSKDAEIKGFQKENQFSTSLTPWIDFTNIFGKIDQSNFDLIENIIYDLTVFEDKKIMKRRLKKKYALPDDKVKQILKLKYKDWSRLSKKLLDGIVADNRFGSSVTVLDVLEMSRLNLMEIINDKDLGYAQMIEEATSCPEDGKFTYEEVERLAGSPALKRGIWQSLQIVEEITKVMKCRPKYIYIEFERSEEAKERTESKIKKLENVYKDLDEQTKKEYKSVLEELKGFDNTKKISSDSLFLYFTQLGKCMYSGKKLDIDSLDKYQIDHIVPQSLVKDDSFDNRVLVVPSENQRKLDDLVVPFDIRDKMYRFWKLLFDHELISPKKFYSLIKTEYTERDEERFINRQLVETRQITKNVTQIIEDHYSTTKVAAIRANLSHEFRVKNHIYKNRDINDYHHAHDAYIVALIGGFMRDRYPNMHDSKAVYSEYMKMFRKNKNDQKRWKDGFVINSMNYPYEVDGKLIWNPDLINEIKKCFYYKDCYCTTKLDQKSGQLFNLTVLSNDAHADKGVTKAVVPVNKNRSDVHKYGGFSGLQYTIVAIEGQKKKGKKTELVKKISGVPLHLKAASINEKINYIEEKEGLSDVRIIKDNIPVNQMIEMDGGEYLLTSPTEYVNARQLVLNEKQCALIADIYNAIYKQDYDNLDDILMIQLYIELTNKMKVLYPAYRGIAEKFESMNENYVVISKEEKANIIKQMLIVMHRGPQNGNIVYDDFKISDRIGRLKTKNHNLNNIVFISQSPTGIYTKKYKL

SEQ ID NO: 91 - protein, 1152 aa, Roseburia inulinivorans
MNAEHGKEGLLIMEENFQYRIGLDIGITSVGWAVLQNNSQDEPVRITDLGVRIFDVAENPKNGDALAAPRRDARTTRRRLRRRRHRLERIKFLLQENGLIEMDSFMERYYKGNLPDVYQLRYEGLDRKLKDEELAQVLIHIAKHRGFRSTRKAETKEKEGGAVLKATTENQKIMQEKGYRTVGEMLYLDEAFHTECLWNEKGYVLTPRNRPDDYKHTILRSMLVEEVHAIFAAQRAHGNQKATEGLEEAYVEIMTSQRSFDMGPGLQPDGKPSPYAMEGFGDRVGKCTFEKDEYRAPKATYTAELFVALQKINHTKLIDEFGTGRFFSEEERKTIIGLLLSSKELKYGTIRKKLNIDPSLKFNSLNYSAKKEGETEEERVLDTEKAKFASMFWTYEYSKCLKDRTEEMPVGEKADLFDRIGEILTAYKNDDSRSSRLKELGLSGEEIDGLLDLSPAKYQRVSLKAMRKMQPYLEDGLIYDKACEAAGYDFRALNDGNKKHLLKGEEINAIVNDITNPVVKRSVSQTIKVINAIIQKYGSPQAVNIELAREMSKNFQDRTNLEKEMKKRQQENERAKQQIIELGKQNPTGQDILKYRLWNDQGGYCLYSGKKIPLEELFDGGYDIDHILPYSITFDDSYRNKVLVTAQENRQKGNRTPYEYFGADEKRWEDYEASVRLLVRDYKKQQKLLKKNFTEEERKEFKERNLNDTKYITRVVYNMIRQNLELEPFNHPEKKKQVWAVNGAVTSYLRKRWGLMQKDRSTDRHHAMDAVVIACCTDGMIHKISRYMQGRELAYSRNFKFPDEETGEILNRDNFTREQWDEKFGVKVPLPWNSFRDELDIRLLNEDPKNFLLTHADVQRELDYPGWMYGEEESPIEEGRYINYIRPLFVSRMPNHKVTGSAHDATIRSARDYETRGVVITKVPLTDLKLNKDNEIEGYYDKDSDRLLYQALVRQLLLHGNDGKKAFAEDFHKPKADGTEGPVVRKVKIEKKQTSGVMVRGGTGIAANGEMVRIDVFRENGKYYFVPVYTADVVRKVLPNRAATHTKPYSEWRVMDDANFVFSLYSRDLIHVKSKKDIKTNLVNGGLLLQKEIFAYYTGADIATASIAGFANDSNFKFRGLGIQSLEIFEKCQVDILGNISVVRHENRQEFH

SEQ ID NO: 92 - protein, 686 aa, Coprococcus comes
MKKQDSPKNNMGYTAYNLNVLGYEEFAKRVELLFKDTDAVKRLNDSHMQMAEGFDLNALPGSPALRRGVSQAIKVLDDIVSVAGKAPDRIYLKVTRTASNSRKGKRTAKRSDKIKQALKALDADAAADLGAAKLLRELGMFDEKEINERIYLYFHQAGKCLYTGKPIDITRIASNDYYVDHVVPLAYRKDESLDNKVLVYAEASRYKSETLLVSPAVQRKMLPFWRMLRNAGLMSERKLNALIRTEISEGMLKSIIGRQFTENSWEAKLFTAAIAAKYPGTVVIPVKAGVIGAVRSRIGIPKSLKANQFYHAHDALLAAEVGRYMELAKPAFVHNRVKYEQYMRKIKLVNEENKKAPKSQLDFFAGGFFFDRVDKDTGEVYWNKDEEVERIYRACGWKNLRVTYAAFEDGGAFWKQTIYSPREKSKLIATKSDRPAEIYGGYSSQTFANFFVYEVMKKKVKQLRFGAVPAAIASKSDPDTYNAMLEMYARGLAKTAKEKFVRIVRARVLKNTMIELYGERFRIAGEKQVYPVRQMPLAIDEVYLLKGVETIAAAGNAGASAKIDFEKAAESLVGFWDLLLEKLPVNYPKLTVQLKLGLLKHPKDILAATSESEFPAIVYKIAEAEIQVMEQASGLRNMSDTKILGGNTFGGSLVFTFNKVLNDPKSKACFIDTTPAGLYEVKTKIW

SEQ ID NO: 93 - protein, 1105 aa, Actinomyces coleocanis
MDNKNYRIGIDVGLNSIGFCAVEVDQHDTPLGFLNLSVYRHDAGIDPNGKKTNTTRLAMSGVARRTRRLFRKRKRRLAALDRFIEAQGWTLPDHADYKDPYTPWLVRAELAQTPIRDENDLHEKLAIAVRHIARHRGWRSPWVPVRSLHVEQPPSDQYLALKERVEAKTLLQMPEGATPAEMVVALDLSVDVNLRPKNREKTDTRPENKKPGFLGGKLMQSDNANELRKIAKIQGLDDALLRELIELVFAADSPKGASGELVGYDVLPGQHGKRRAEKAHPAFQRYRIASIVSNLRIRHLGSGADERLDVETQKRVFEYLLNAKPTADITWSDVAEEIGVERNLLMGTATQTADGERASAKPPVDVTNVAFATCKIKPLKEWWLNADYEARCVMVSALSHAEKLTEGTAAEVEVAEFLQNLSDEDNEKLDSFSLPIGRAAYSVDSLERLTKRMIENGEDLFEARVNEFGVSEDWRPPAEPIGARVGNPAVDRVLKAVNRYLMAAEAEWGAPLSVNIEHVREGFISKRQAVEIDRENQKRYQRNQAVRSQIADHINATSGVRGSDVTRYLAIQRQNGECLYCGTAITFVNSEMDHIVPRAGLGSTNTRDNLVATCERCNKSKSNKPFAVWAAECGIPGVSVAEALKRVDFWIADGFASSKEHRELQKGVKDRLKRKVSDPEIDNRSMESVAWMARELAHRVQYYFDEKHTGTKVRVFRGSLTSAARKASGFESRVNFIGGNGKTRLDRRHHAMDAATVAMLRNSVAKTLVLRGNIRASERAIGAAETWKSFRGENVADRQIFESWSENMRVLVEKFNLALYNDEVSIFSSLRLQLGNGKAHDDTITKLQMHKVGDAWSLTEIDRASTPALWCALTRQPDFTWKDGLPANEDRTIIVNGTHYGPLDKVGIFGKAAASLLVRGGSVDIGSAIHHARIYRIAGKKPTYGMVRVFAPDLLRYRNEDLFNVELPPQSVSMRYAEPKVREAIREGKAEYLGWLVVGDELLLDLSSETSGQIAELQQDFPGTTHWTVAGFFSPSRLRLRPVYLAQEGLGEDVSEGSKSIIAGQGWRPAVNKVFGSAMPEVIRRDGLGRKRRFSYSGLPVSWQG

SEQ ID NO: 94 - protein, 1361 aa, Anaerococcus tetradius
MGNYYLGLDIGTNSVGWAVTDENYNIERFKKKNMWGIRLFDEAKTAESRRIHRQARRMRQRKIQRLNLLMELFDVEISKVDESFFIRKKESDLHYEDKSQDSRYALFNDKEFNDKDYHNKYPTIFHLIMDLIENDEKKDIRLLYLACHYLIKNRGHFIFEGQKFDVNSSLNNNINKLKSHLDQFYNICLDFDNDKLIEILVNQNLNISEKSKKIKELLRKTNLEVGIANLIAGGSIKLSNMFDDDELKNLDYNSLSFKNSNFDEGRELFEEVLEDRFELVEILKDIHDASVLETMLSSASISPDGGKYISSSMINSYNKHKRDLKLLKKIIKKYKKSEYDNIFRDENIKNNYLSYTRTGINKNKKVQAEDNTDSDGFYKYIVKILKDIKENDSDEDIKYILSEIDKKNFVPKQRTKENSVIPYQLREIELRKIIDNQSKYHKFLNEVDEKGISVKEKIISLLTFRIPYYIGPLNPSYNEEKNFTTSWVKRLAKGKVTPWNFEDMVDIDASREAFIENKLNKCSFLLDETVLPKDSLLYQEYMVLNELNNLKINGQSINTDLKKSIYEELFKKYKKVTRKRLISYIKEKENMSGDIVITGIDGDFKQGLKSYIAFKDIIGEKIDDDIYRKEVEKIIRDISLYGDDKSFIQKKIKNENKLDLSDDQISKIAKLKFKDWGRFSKKLLVGIKASDKNTGEIDNIIGFMRNYNYNIMQLMANVFTFKDEIEKLNSKYYTDEKINIDYLDDLYLSSPAKRMLWQSFQIVDEIKNIKNSDPKKIFIEMARSKEDKPTRKMSRKSRLEKLYTDSKKQFIKLFGPDEYDKLNNEIKNKSESDFRWDNLYLYYTQFGRCMYSLDPIDLEELSNKNLYDQDHIYPKSKIYDDSIENRVLVKKQLNLDKSNEYPIPDRVLNKDKNKLLAFWKMLNEKELIGDKKYARLIRKSPFTDEELGDFIARQLVETRQATKETANMLKRLCPDSKIVYVKAKNVSDFRRKFDILKCRSINDLHHAHDAYLNIVVGNVFDTKFTSNPLNFIKNNSKNRSYNLEKIYDYDVIRNEKIAWLAERKEENQDGSIATVLKNLSKNDIRVTRRTYIKCEDLFDENIVRKGNGKFPIKENNNKSDTNKYGGYSGIKNAYFVLLEDEKHNRILEAIPSFIYKKEKNGEKGSVINYLQNILGIKSAKILRDKIKIGSLLKIDKFPYNLAGKSGNGILISGGVQLILDKNTSKYIKKIENYKYKLDENKDYQINIFDKLSKEENIKLFDLFVDKFENSIYKNRVNIKLKEIKLARPKFEHLSIEEQIKTLTQMLILFGRENNAVNLEYIGLPKNTGKTKINKKINNKDIKIINQSITGLYETEEDLANI

SEQ ID NO: 95 - protein, 1377 aa, Lactobacillus brevis
MESNHDGEQVKYTLGLDIGTSSIGYAAIDKHQKPIRAKGKHVIGVRLFQEGQTAADRRAFRTTRRRLKRRKWRLNLLNRLFDPYLSEVDPNFLPRLRQSNLSPKDDNKHFNGSTLFPDKTDAAFYRQYPTMYHLRYALMTEKRKFDIREVYLAIHHIVKYRGNFLNSATVDSFKTSNIDFTSQFDRLNELYRQVILDEPFQINMDQVDEMTNKLLDNDALKLDTQKQVAKLLPVIYNDKPIDKQYTRIATEFSKAILGYKTKLDVILNLDTQNAKDWVIRLDDEDIDDKLPALVENLDESRQEIVTIIRDLYAQITLNAIVPKGKSLSESMVDKYNDHKDHLDLLMGLIHELGDDSAKGIKLREAYTQYVGKSDDKTLNQDDFYAAIKKNLDEDSKRSPKIQRLIEQASFMPKQRTSANGVIPHQLHQLELDRIIENQGRYYPFLKKPNPNTHKPNGGKYKLDELVAFRIPYYVGPLITKRDQEKTSGADFAWMIRKPGQEGEITPWNFDQKVDRMASANRFIRRMTTKDSYLVAEDVLPDASLIYEKFKALNELNMLKVNDSRLSPSQKQDLFNNLFKKQKTIRTKKLQTYIRTNWELPSVMISGLADPDKFNSSLSTYIDFRDIFGEKVDDPNRQADYEEIIEWSTVFEDRKIYQAKLNQLDWLTEPQRKALLTKRYTGWGRLSKKLLTGLKDQNGDSILDQLWKTNDNFMQIQSRDEFAKQIHDENAKQFHEANNVDDILDDAFTSPQNKKAIRQVDKVVQDVVKAVGYAPDKIAIEFTRSLENNPQRTVSRQRQLQAAYKNIPREIMKSGLMAELGSVADSKKVLSDKLYLYFTQMGKDMYEDKTINIDNLPNYDIDHILPQAFIKDDSIDNRVLISKEENARKSNRVPLKFFGAKRMGFWKDLLNNGLISNRKFQNLTTDPEKISKYSAKGFIHRQLVETSQVIRLVANILGNEYSQAGTTIIEVSAKMNRQLREDFHLIKNRNVNDYHHAMDAYLTAYVGDYLYLRYPKLRPYFVYGDFKKAEDQDLNIRNFNFLHDLKDNESLDKIVDSETGEIVWEKHGSVKQLKKVYHYKFMLVSQEVYTRQDALFNQTIYPASDADKRKLIPIKNSKPVDVYGGYSGNIDAYMAIVRVHGKKEDNYKVVGIPMRAVTKLKKAEKEGHDSYLNAVHEVLKPQFTKKKKNRKTGEITETVDEFDVLLGKVYYRQLIVDGNKKFMLGSSSYQYNAKQLVLSDKAMQVLSKNGKVKSQDENQNLIDVYDEILEKVDQYFELYDQRHYRESLHKGRGIFVNLPLSNQYDGSKLTSYGKYETIDAILNGLHANATMSNLRYLGISSPFGKMQASNGLTIDPDSIICYQSPTGLFERQIKLSDL

SEQ ID NO: 96 - protein, 1239 aa, Lactobacillus buchneri
MTEKRKFDIREVYLAIHHIVKYRGNFLNSATVDSFKTSNIDFTSQFDRLNELYRQVILEEPFQINMNQVDKMTNKLLDNDALKLDTQKQVAKLLPVIYNDKPVDKQYTRLATEFSKAILGYKTKLDVILNLDTQNAKDWAIRLDDEDIDDKLPALVENLDESRQEIVTIIRDLYAQITLNAIVPKGKSLSESMVDKYNDHKDHLDLLMGLIHELGDDSAKGIKLREAYTQYVGKSGDKTLNQDDFYAAIKKNLDEDSKRSPKIQRLIEQASFMPKQRTSANGVIPHQLHQLELDRIIENQGRYYPFLKEPNSNTHKPNGGKYKLDELVAFRIPYYVGPLITKQDQEKTSGADFAWMIRKPGQGGEITPWNFDQEVDRMASANTFIRRMTTKDSYLVAEDVLPDSSLIYEKFKVLNELNMLKVNDRRLSISQKQDLFNNLFKKQKTIRTKKLQTYIRTKWELPSVMISGLSDPDKFNSSLATYIDFRDVFGEKVDDPNRQADYEKIIEWSTVFEDRKIYQAKLNQLDWLTESQSKALLTKHYTGWGRLSKKLLTGLKDQNGDSILDQLWKTNDNFMQIQSRDEFAKQIHDENAKQFHEANNVDDILDDAFTSPQNKKAIRQVDKVVQDVVKAVGYAPDKIAIEFTRSPQDRPQRTFSRQRQLQSTYLNVAKALMKSNLNQELKSVIDSQQTLTDKLYLYFTQLGQDMYTGKEINFDELVNYQIDHILPQAFIKDDSLDNRVLVSAPINNAKSDNVPVKKFGAKMGYFWKQLAENHLISKRKLNNLTTDPDKIGKFTAQGFIHRQLVETSQVIRLVANILGNEYGHDGTTIIEVTAKMNHQMRKDFDLIKIRDVNDYHHAMDAYLTAYVGDYLYLRYPKLRSYFVYGDFKKLKDQSLKIRNFNFLHDLTNDEAGDKIVDQETGEIIWDKHESVKQLKKVYHYKFMLVSQEVYTRQDALFNQTIYPASDADKRKLIPIKNNKPVDVYGGYSGNVDAYMAIVRIHGKKEDKYKVVGVPMRAVADLKKAESKGRDNYLNAVHEVLKPQFTKKKKDRKTGEITEMMDDFDVLLGKVYYRQLIVDGNKKFMLGSSTYQYNAKQLVLSDKAMQVLSKDDKLKNQDENQNLIDVYDEILEKVDQYFELYDINKFRQKLHDGRKKFIELPVDNDFNGKKLISYGKRATIISILNGLHANATMSNLKYLGISSPFGMLQVPNGIILSPASRICYQSPTGLFERKVKLSDL

SEQ ID NO: 97 - protein, 1381 aa, Lactobacillus fermentum
MDYVKEYHIGLDIGTSSIGWAVTDSQFKLMRIKGKTAIGVRLFEEGKTAAERRTFRTTRRRLKRRKWRLHYLDKIFAPHLQEVDENFLRRLKQSNIHPEDPAKNQAFIGKLLFPDLLKKNERGYPTLIKMRDELPVEQRAHYPVTNIYKLREAMINEDRQFDLREVYLAVHHIVKYRGHFLNNASVDKFKVGRIDFDKSFNVLNEAYEELQNGEGSFTIEPSKVEKIGQLLLDTKMRKLDRQKAVAKLLEVKVADKEETKRNKQIATAMSKLVLGYKADFATVAMANGNEWKIDLSSETSEDEIEKFREELSDAQNDILTEITSLFSQIMLNAIVPNGMSISESMMDRYWTHERQLAEVKEYLATQPASARKEFDQVYNKYIGQVPKEKGFDLEKGLKKILSKKENWKEIDELLKAGDFLPKQRTSANGVIPHQMHQQELDRIIEKQAKYYPWLATENPATGERDRHQAKYELDQLVSFRIPYYVGPLVTPEVQKATSGAKFAWAKRKEDGEITPWNLWDKIDRAESAEAFIKRMTVKDTYLLNEDVLPANSLLYQKYNVLNELNNVRVNGRRLSVGIKQDIYTELFKKKKTVKAGDVASLVMAKTRGVNKPSVEGLSDPKKFNSNLATYLDLKSIMGDKVDDNRYQMDLENIIEWRSVFEDGEIFADKLTEVEWLTDEQRSALVKKRYKGWGRLSKKLLTGIVDENGQRIIDLMWNTDQNFMQIVNQPVFKEQIDQLNQKAITNDGMTLRERVESVLDDAYTSPQNKKAIWQVVRVVEDIVKAVGNAPKSISIEFARNEGNKGEITRSRRTQLQKLFEDQAHELVKDTSLTEELEKAPDLSDRYYFYFTQGGKDMYTGDPINFDEISTKYDIDHILPQSFVKDDSLDNRVLVSRAENNKKSDRVPAKLYAAKMKPYWNQLLKQGLITQRKFENLTMDVDQNIKYRSLGFVKRQLVETRQVIKLTANILGSMYQEAGTDIIETRAGLTKQLREEFDLPKVREVNDYHHAVDAYLTTFAGQYLNRRYPKLRSFFVYGEYMKFKHGSDLKLRNFNFFHELMEGDKSQGKVVDQQTGELITTRDEVAKSFDRLLNMKYMLVSKEVHDRSDQLYGATIVTAKESGKLTSPIEIKKNRPVDLYGAYTNGTSAFMTIIKFTGNKPKYKVIGVPTTSAVGLKRVGKPGSESYNQELHRIIKSNPKVKKDFEIVVPHVSYSQLIVDGDCKFTLASDTYQHPATQLVLSKESMEIIADDFKFVKENPATADEQLVRVFDEIVNQMNHYFTIFDQRSNRQKVTKARDKFVSLPTESEYEGAKKTQVGKTEVITNLLMGLHANAAQGDLKVLGLSTFGFFQSSGGLNLSEDAMIVYQSPTGLFERRICLKDI

SEQ ID NO: 98 - protein, 1306 aa, Sphingobacterium spiritivorum
MKHILGLDLGTNSIGWALIKQNFENKQGEILGMGSRIIPMGAELSKFEQGQAQTKNANRRIARGTRKLNKRYKQRRNKLIYILQGLGMLPDQIKLVNQFSDPNKLDKISILPISKNQQQLTAFDLLELRVKALTEKIELEELGKVIYKYNQLRGYSGGNSEPEKEENNEDESEENEKTNDSFVVFSKVLSLGLPEEITFKGKKLSKRKIAIETEDGIIEAETFLDSLKENDSLELHVNIRRAKSGDTITIKLPSKTSWRKKMENIEKQLADKSKELGREYFISELLFDILKENKWAKIRNNVILRSRYESEFDAVWSEQSKYYPILNHLETDRLQKILEFIFPGQKESQEKLRQTGLKEGLKYVIKNQVVFYQRELKDQSDLISNCRYEPTEKVVAKSHPVFQEYKIWEQINKLVINTKIENGVNRKGEIRYKYIDKPIPVALKEWLYEELQSKKEVSFNPILTKLKKEFKLRENVDFLNGMNAKDKLKGNETKVILQKALGELWNIFGLDDSERQVELWEILYNGKGNEYDLTSERTSNILAFIEKYSPDLENKNDVAIKISKIKFSRNYSNLSLKAIDNILPLVRAGKFFDQNFSEALSHKIVKLLNENVEDPFEKSAQEFLDKNQDVLSDGGIVNAIATILVYDKHTAKEYSGDELIKEFTQISRLKQGELRNPLAEQIINEALVIVRDIWRKYGFKPDEIRVELARELKNNAVERGKMYSANLKSQKHNAEIRNKLIELKQEISIANIEKYKLWVSQENLQEVYLKNYNDPSKSEIEKLKLWESQGHISPYTGQPISLSELFNRERYDVDHIIPQSRYFDDSLSNKVICEKSINNEKGNRTSMEYFEVGSVNYRIFTKDQFIDHANKYFSGKKRKNLLATSIPEDPIQRQIKDTQYISIRIREELNKIVGNENVKTTTGGITDYLRNHWGLTDKFKVLLKERYEAVLPKIAQLEYDNYKKETEKKFTEYKNADVEFNEPILDEEIFIEKFRSEFIRKKNNKLIIKGWSKRIDHRHHAMDALVIACTQPAHIKRLNDLNQVLKEWLDKNKEKFFPGFSGTKTELLDEVLNLEEEKRREIFNQLEKFRAIEMPWKGFPEEAEQKLKEVIVSHKPKDKLLLQYDIQGNKQIKLRGQLHEGTLYGLSNGKEIYRIPINKLAGKQFATEKTIEKIVNPFLKNVIEEHLKSFGKKEEAFSAEGILDLNKKLAERKDEQQNPKPHPPISTIKIYYKDPSKSKKKKTDDEDDISLQKLNRKKSFNDSLYVKTGDNYLFAVMEKEVFNKKLNKDKTERHYDLKLFLTLLIF

SEQ ID NO: 99 - protein, 1358 aa, Acidaminococcus sp.
MGKMYYLGLDIGTNSVGYAVTDPSYHLLKFKGEPMWGAHVFAAGNQSAERRSFRTSRRRLDRRQQRVKLVQEIFAPVISPIDPRFFIRLHESALWRDDVAETDKHIFFNDPTYTDKEYYSDYPTIHHLIVDLMESSEKHDPRLVYLAVAWLVAHRGHFLNEVDKDNIGDVLSFDAFYPEFLAFLSDNGVSPWVCESKALQATLLSRNSVNDKYKALKSLIFGSQKPEDNFDANISEDGLIQLLAGKKVKVNKLFPQESNDASFTLNDKEDAIEEILGTLTPDECEWIAHIRRLFDWAIMKHALKDGRTISESKVKLYEQHHHDLTQLKYFVKTYLAKEYDDIFRNVDSETTKNYVAYSYHVKEVKGTLPKNKATQEEFCKYVLGKVKNIECSEADKVDFDEMIQRLTDNSFMPKQVSGENRVIPYQLYYYELKTILNKAASYLPFLTQCGKDAISNQDKLLSIMTFRIPYFVGPLRKDNSEHAWLERKAGKIYPWNFNDKVDLDKSEEAFIRRMTNTCTYYPGEDVLPLDSLIYEKFMILNEINNIRIDGYPISVDVKQQVFGLFEKKRRVTVKDIQNLLLSLGALDKHGKLTGIDTTIHSNYNTYHHFKSLMERGVLTRDDVERIVERMTYSDDTKRVRLWLNNNYGTLTADDVKHISRLRKHDFGRLSKMFLTGLKGVHKETGERASILDFMWNTNDNLMQLLSECYTFSDEITKLQEAYYAKAQLSLNDFLDSMYISNAVKRPIYRTLAVVNDIRKACGTAPKRIFIEMARDGESKKKRSVTRREQIKNLYRSIRKDFQQEVDFLEKILENKSDGQLQSDALYLYFAQLGRDMYTGDPIKLEHIKDQSFYNIDHIYPQSMVKDDSLDNKVLVQSEINGEKSSRYPLDAAIRNKMKPLWDAYYNHGLISLKKYQRLTRSTPFTDDEKWDFINRQLVETRQSTKALAILLKRKFPDTEIVYSKAGLSSDFRHEFGLVKSRNINDLHHAKDAFLAIVTGNVYHERFNRRWFMVNQPYSVKTKTLFTHSIKNGNFVAWNGEEDLGRIVKMLKQNKNTIHFTRFSFDRKEGLFDIQPLKASTGLVPRKAGLDVVKYGGYDKSTAAYYLLVRFTLEDKKTQHKLMMIPVEGLYKARIDHDKEFLTDYAQTTISEILQKDKQKVINIMFPMGTRHIKLNSMISIDGFYLSIGGKSSKGKSVLCHAMVPLIVPHKIECYIKAMESFARKFKENNKLRIVEKFDKITVEDNLNLYELFLQKLQHNPYNKFFSTQFDVLTNGRSTFTKLSPEEQVQTLLNILSIFKTCRSSGCDLKSINGSAQAARIMISADLTGLSKKYSDIRLVEQSASGLFVSKSQNLLEYL

SEQ ID NO: 100 - protein, 653 aa, Oribacterium sinus
MELINSEEFTFKEELEKHTQVAMKQLSEFTYEDLEDSYFSVPVKRMIWQTLLVVREIEKVMGYAPKRIFVEMTRTEEEKGDKGRKESRGNQLLELYKSIKNTDSHNWKEEIAAADKDGKLRSKKLFLYYMQMGRDMYTGEEIDLGRLYDDNLYDIDHIYPRHYVKDDSIMNNLVLVNRRANQDIKKDLYPIPEQIKANPNVHMLWDALHKQKLITDEKYARLTSNTAFSEKQLGDFIARQLVETGQGTKGVADLLEQLFKDTVIVYAKASNVSDFRRDNGFLKSRLVNDFHHAQDAYLNIVVGNVYYTKFTKNPWNFICKDYEKDKEKNRYNLARMFDWNVVRGSETAWIVERKDEKGTISTVRKMMQKNTPLLTRMNFEQHGSIANATLYSAKKAKSENYLPLKTADEKMSDVKKYGGYTSMSIAYYFIVHHKEDKKENVTIEALPLYCKDKVEREENGLEKYCEEVLGYGEVNIIRRKLKIQSLLEFNGYQVHLSGKTGNQLILRNAISLCLSTKWITYIKKLEKAVNIQIVEEVVTPEENIKLYNLLADKHANTVYSKRPNAYGEKLLADREIFVTLEFGKQCEALLQILSLTKIGSTEANLLLIGESEHSGKILISKNLKASDRPAVINQSPCGLYEKKEWIFDKIVEK

SEQ ID NO: 101 - protein, 1436 aa, Capnocytophaga gingivalis
MKYIKYILGLDIGSNSIGWALIQLDLLQKTKRIIAAGSRIIPMDQKVLSDFGKGITISPTAQRTSYRNARHCRERHLLRRERLHRVLHILGFLPTHYDKQIDFSKRYGKFVDNTEPKIAYNEGKFLFMDSFQEMLSDFKSHQPDLFYTKKNGEESKIPYDWTIYYLRKKALSQKISKEELAWIILNFNQKRGYYQLREEEGNKENDFEIISSKIISVIKKDKDKKYNKYWYDIILENGLVYQAAFYNDFVYNWINQDREFIIERTSLKNGAEKVKLSYLPTFDEIDKMDKKEQDKYYKKIKIKTENSIGNKTVGCYIYDHILQNPNEKIKGKLVRTIERKYYKEELKAILEKQIALQPELFTDQLLADCIRELYSKNEAQQRNLAARDFVHLLVEDIIFYQRPLRRQKSTLANCSLESRSYIDKDSHTRKEAPLKVCPKSNPYYQEFRVLQWLQNLKIYEIDSDQEVTHQFIKTLEDKQQLFEFLMAQKEIDCEELLKYFLNQTYPNAKEKALKSELKKWKDTYRWNYVYDIGEKSSKKYPMNETRYELKRHLEKVANLPDDFLSSEVEYLLWHLIYSVKDKVAYEKGLKKFAQKHHLDKDSFVESFKKFNPYPSEYGSFSEKAIRKLLPLMRFGAHWDFNHIDKNTQKRIEDLITGVENEEIRTILREKAEKYQLEKETDFQDLPLWLAQYIVYNRHAEASSLEKWTSVNDLETYLNEFKQHSLRNPIVEQVVMETLRVVRDIWQQYGQGQASFFNEIHIELGRELKKTAKEREKLSKQNQKNEDINLSIKEKLKELEKYNTRAYSITHQEKYKLWLEQKHISPYTGQIISPENLFTDNYEIEHIIPQSRFFDDSLSNKVVCESIVNKAPYKDRQLGLEFIKNQGGRIVKELSKENKTIKIFTEEQYRTFIKEHYSNNPEKTKKLLLEEIPEKMVARQMNDTCYISKFISEILSKIVRSDEQDEGVHSKNVILCTGKITSILRQDWGLNDIWDNLILPRFERMNNLLQKEKFTIYSIEKQKKIPVVPINDQFKSFQKKRIDHRHHAMDAIIIACTTREHINYINNQHALEKEKDKKEKQEERDKLREKLCIKKYNNRSEGNYSWIFKKPWDTFTQEVRVALEDIVVSFKQNLRVINKATNYYERWVEENGKYIKKMVKQEGTNWAIRKPLHEETISGKIYLDREKITKNDILTATRKTVDSSFDDKRIKKITDTGIQKILLNYLKYKGSPEIAFSPEGLEELNKNLSIYNDGKPHKPIYKVRIYEKGSGRFALGEKGRKYKKYVQGASNLYFGIYQGAKRSFATIPLNEVIERQKQGLPSVPEYNEKGDLLLFSLSPNDLVYVPIEGEIIENIDFRNLSKEQKERIYNVNDFSSTCYFTPNRIAKAIFPKEVDLQRKGDKLSGSYDTKTASLEGIQIKEVCIKLKVDRLGNISKA

SEQ ID NO: 102 - protein, 1069 aa, Bacillus cereus
MNYDIGLRIGITSCGWSIINKDLERIEDLGVRVFEKAENPDGTASAAPRREARKSRRKHRRKKHRIERIKRLIVQHDLLSKKELDSLYLSPFNIDVWNLQVEALERKLDNREFARVLIHLVQRRGFQTIRKSVEIQEEGKLLENVSENERIMKVNGYKTVGEMFSKHEKFTHHKRNKDGSYTSVVTRSLLLKEIKTIFNSQRILGNVFSTQKLESDYLYIWGSQRPTLTYEQLMSMVGNCIYEKKEKRAPKTSWAFQYFSLLQKINKLKVSDDNTLRKLSKEERDIVIELAFKKKNVSFVDIRKALKLNDNTKFNHLTYSHVVETKKVEKATFIELKGYHLIKKQLKDRNVELTQELQPKDYDAIAAASTFFKNDIEFRDYLRNQYLDSNGKRKSNIANKVFEDKVIAAVFELNFSKVCHLSFKSLYKLIPHLEKGLDYKEAILCAGYNFRDENKRDKKLFLPVIQQETNPVVHRALTQARKVINAIIREYGSPNTIRFVVANDLAKTYKQRKELESTLKKNRAENEKIKTKLLSMGIINPTGMDIVKYKLWYEQSGICLYTGRQMELSSLFKPGYSIVNHIIPYNRSFDDTYHNRVLTLTETKYEKGNKIPFEYFGAEETCWNEYEKRVSTSKKIHDKKREKLLIRNFDIEYENEMISNNVFDTHYIGSYFEKYIDEHLQFKKSTKKQKVFSIHGNMVAHLHSRWGFNKNSREIYLNHAVDAAIVAVLTDQLIRNIADYYRRDNILEQKGSLKFPEPWKSFSIELEARISPQVRDLIKKLNLDSYLDVDILHIKPVFISKKPRRKVNGEAHKSTIRSLIGINEIGKTVTCIKTRLEDIPFDENGDFPMYGKDTDKYTYTAIKERYLEFNKDKEKAFSTPLYKLKRNGEPGNQIKSVKIIDTRNIVNKVNQGKGIAYNSNIIRVDVFSRDQKYYVVPIYLRDFIKGSLPNKIITAAKGFMQWPETDNSYTFLFSIFPNDLIKVVPKEGKFIKAKNENKENINLTEILGYFKGLDSSTGAFTLESHDGSLLARGIGTKNLLLIEKYQVDVLGRYNKVGNEERQDIKIQQN

SEQ ID NO: 103 - protein, 1391 aa, Lactobacillus jensenii
MKEIKDYIIGLDIGTNSCGYVVTDKQNNILKLKGKTAIGARLFKEGEAAADRRAFRTTRRRLARRRWRLSLLEEIFDEEMNKVDPSFFRRLKESDYSPKDRRKQFNSIVFESSEADKAFYEKYPTIYHLRNALMHDNQKHDLREIFLAVHHIVKYRGNFLREDSVKAFKAAKFTLQGEDGIGPVDKLNDLLKEIYIEAAPELATDNLSKIEDIIKDKKLYKQDKLKQIANLLPKAVDSKDKAKLNKDIAKQVANALMGYMFRLDTLFSFTDVDVKDYKLKFSDANIDESLDALTSLLTDAQIEFVLELQSIYNTIVLNEIVPDGMSLSESMVKKYDDHKKDLKLYKEYIDSLSDQKKAKQLEAAYALYVNYRKADLLAAKKLFEKKKIGDKKFVDVISNFEVFGKFVSDNLDDSELANKIKARLDLGEFLPKQRTNQNGVIPYQLHQVELTQILEKQGKYYPFLITPNPVESHRNNAPYEISELVSFRVPYYVGPLIDNQSIKDKQNKNKFAWMVRQKQGQITPWNFEEMVDTTESANQFIKRMTRKDTYLLAEDVLPKSSLIYQKFMILDELNRIKIDGKKLTSKLKHDIFEKLFKKQKSINLDNLKNYLLAEGNIPGLIEGLSDGINFNNSFSTYIDYRNIFGDEIDNPNKQADFEKMIEWSTVFEDRKIFKRKLKEITWLTPEQIKQVSSKRYSGWGRLSKKLLTQITDENGVNILQRLWNEPETLTEVLANPVIKRKISEANSLFVQINKVENILDDAYTSPQNKKAIRQVIRVVDDIIAAAHGKKPSQIAIEFARSSQNKAKVPDTRKKQLDKIYNKISSEILDSSIKNELKNLKSNKYLSKDKLFLYFKQMGRDAYTGDKLSLDQLQNYDIDHIFPRSFIKDDSLDNRVLTQKPINAKKSDYGIPALEFGNKYVPDLGITVKEMWKLWQENGLISKSKLINLCTNPKKIGSKRASGFINRQLVETSQVIKLVAIILQAEFPDTEIIEVKALQNTTLRESFHLYKNRSVNDYHHAIDAYLTTIVGNYLYQVYPKLRPYFVYGQFKKFNQEKNIDILKRLKNFNFLRQLIFNTDDNIYISGTKEIVFNKKDIIHKLETAYGYKYMNISRECYQETSSLFNQTLYAHNSSVKNSLIPKKKGLPTEIYGGYSGNKDSFFVLVKIVKKRTNLYRIVGIPTRELAKLNSSNNYNQALNKIVESKLCLKETESFKILIKRLLYGTLIVDNGQKFRIGSFKEKHNVQQLVLQLKSMKYIKFYIDGGQNYFTDVERKKLEKQDRDKCLLYVFDDIMNVVNKRFTLFDMSKYEKDGDSLREKFNCLDFNDKVSILSDLLKAFHANSDRTSITKLKITNLGRHQAGKNGITLTTNAQIIYQSPTGLFERRIKIKDL

SEQ ID NO: 104 - protein, 1114 aa, Eubacterium rectale
MNYTEKEKLFMKYILALDIGIASVGWAILDKESETVIEAGSNIFPEASAADNQLRRDMRGAKRNNRRLKTRINDFIKLWENNNLSIPQFKSTEIVGLKVRAITEEITLDELYLILYSYLKHRGISYLEDALDDTVSGSSAYANGLKLNAKELETHYPCEIQQERLNTIGKYRGQSQIINENGEVLDLSNVFTIGAYRKEIQRVFEIQKKYHPELTDEFCDGYMLIFNRKRKYYEGPGNEKSRTDYGRFTTKLDANGNYITEDNIFEKLIGKCSVYPDELRAAAASYTAQEYNVLNDLNNLTINGRKLEENEKHEIVERIKSSNTINMRKIISDCMGENIDDFAGARIDKSGKEIFHKFEVYNKMRKALLEIGIDISNYSREELDEIGYIMTINTDKEAMMEAFQKSWIDLSDDVKQCLINMRKTNGALFNKWQSFSLKIMNELIPEMYAQPKEQMTLLTEMGVTKGTQEEFAGLKYIPVDVVSEDIFNPVVRRSVRISFKILNAVLKKYKALDTIVIEMPRDRNSEEQKKRINDSQKLNEKEMEYIEKKLAVTYGIKLSPSDFSSQKQLSLKLKLWNEQDGICLYSGKTIDPNDIINNPQLFEIDHIIPRSISFDDARSNKVLVYRSENQKKGNQTPYYYLTHSHSEWSFEQYKATVMNLSKKKEYAISRKKIQNLLYSEDITKMDVLKGFINRNINDTSYASRLVLNTIQNFFMANEADTKVKVIKGSYTHQMRCNLKLDKNRDESYSHHAVDAMLIGYSELGYEAYHKLQGEFIDFETGEILRKDMWDENMSDEVYADYLYGKKWANIRNEVVKAEKNVKYWHYVMRKSNRGLCNQTIRGTREYDGKQYKINKLDIRTKEGIKVFAKLAFSKKDSDRERLLVYLNDRRTFDDLCKIYEDYSDAANPFVQYEKETGDIIRKYSKKHNGPRIDKLKYKDGEVGACIDISHKYGFEKGSKKVILESLVPYRMDVYYKEENHSYYLVGVKQSDIKFEKGRNVIDEEAYARILVNEKMIQPGQSRADLENLGFKFKLSFYKNDIIEYEKDGKIYTERLVSRTMPKQRNYIETKPIDKAKFEKQNLVGLGKTKFIKKYRYDILGNKYSCSEEKFTSFC

SEQ ID NO: 105 - protein, 1362 aa, Lactobacillus paracasei
MTKLGKPYGIGVDIGSNSIGFAAVDENSHLIRLKGKTVIGARLFEEGKAAAKRRAGRTTRRRLSRNRWRLSFLRDFFESHITPTDPNFFMRQKYSEISPKDKARYKYEKRLFNDRTDAEFYQQYSTMYHLRNRLMTDPSRADVREIYFAIHHILKSRGHFLTPGDAKDFNTNDVALDEIFPALQDAYAQVYPDLGITFDEDKANEFKTILLNEIATSIDTQRALVKLLLAEEDDKDILKQQKQVLTEFAKAVVGLKTKLNLALGTEVDSSEATAWNFSLGQLDDKWAGIESAMTDEGTEILDQIRDLYRARLLNGIVPTGKTLSQAKVDDYTQHHEDLQLFKAYLKQLEDDGTAKAIRQLYDRYIDGDDAAPFLRENFVKALTKDVTAHPNTKSPELLERLAQPDFMLKQRNKANGAIPVQMQQRELDQIIKNQAVYYDWLAAPNPVEKHRKSMPYQLDELLNFRIPYYVGPLVTAKEQKAAQGGVFAWMVRKDPEGNITPYNFDEKVDREASANTFIQRMKTTDTYLIGEDVLPKQSLLYQRYEVLNELNNVRVNNEKLSIEQKQQVIRELFERHNSVTIKQFAENLRAHGDYAHIPEIRGLADEKRFLSSLSTYRQLKSLLPEAIDDPAKQADIENIIAWSTVFEDAAIFKTKLKEISWLGSEAITKLSNIRYRGWGQFSRKFLNGLTLGNGHTIIQELLLSTNNLMQILTDETLQKKMTELNADKLKTANINDAIDNAYTSPSNKKALRQVLRVVDDIKRAADGQDPSWLYVETADGGGTPGKRTRARQHQLQEIYANAAHELIDTAVRGELEDKISDKADFNDRLVLYFMQGGRDIYTGAPLNIDQLSSYDIDHILPQSLIKDNSLDNRVLVHAIINREKNATFASTIYAQKMNATWRQWHEAGLISGRKLRNLQMRPDQIDKYASGFVARQLVETRQIIKLTEQIVAAQYPDTKIIAVKAGLSHQLREELEFPKNRDVNHYHHAFDAFLAARIGTYLLKRFPNLQAFFTYGKFTKADVKKLRGFNFIRDITHAEDKIVAKDTGEVVWDKQRDVDELDRIYNFKRMLITHEVRFETADLFKQTVYGARDSKEAGGSKQLIPKKKGYPVDIYGGYFRENTAYLAVVKVTKKTETIFKVVKIATSQVAALNKARSRSTAEELSVLTELLKPKFSKVGKNGKITDTPFEVVLPRVPREQLFYNAKYGFFMVNSDTMFHNFQEIWVSRSDQKILQQIRKAKIDYPNVDQDLDNLFHNLADQIVKYFDLYSIAGFKEKISQSQNTFNDLAVDDTDQSVGKITVINELLKGAQANGMTGSLKVLKISTPFGFTQDKSGVLTKDSSIIYQSPTGLFERSVRLTDL

SEQ ID NO: 106 - protein, 1056 aa, Actinobacillus minor
MKALNYILGLDLGIASVGWAVVEIDQNELPIRLIDLGVRTFERAEVPKTGDSLALARRLARSSRRLVRRRAVRLLKAKRLLKQEGILQADDFHSSHLKPLPNNPWELRVKGLNHLLDRKEWAAVLLHLLKHRGYLSQRKNESKTDNKELGALLKGVSENRQLLQAQAFSTPAEIAIKKFQQEEGHIRNQRGAYSHTFDRNDLLAELRLLFQKQREFNNPYTSQSLEQAIAELLMWQKPALSGEAILKMLGKCTFEPSEYKAPKNSYSAEYFVWLTKLNNLRILENGADRGLTAEERQLLINQPFEKAKFTYAQARKLLELSDLAIFKGVRYGKDNAESATLMEMKAWHAIRKALESNGLKTEWNGLKTKPELLDKIGTAFSIYKTDEDISQYLNGELSPAVLNALLENLSFDKFIRLSLQSLAKILPLMEQGLRYDEACKQVYGDHYGKKEQLELRFLPKIPVEDIRNPVVLRTLSQARKVINGVVRLYGSPARIHIETGREVGKSFSERRDISKRQEENRNERQRAVEKFKEFFPHFVGEPKAKDILKMRLYEQQHGKCLYSGKELDLNRLLEKGYVEIDHALPFSRTWDDSFNNKVLVLASENQNKGNQTPYEWLNGKENAERWKLFQALVNGSRFPYSKKQRILTKYLDEDGFRERNLNDTRYVARFLCNFIEDNMQLVGQGKKRVFASNGQITALLRRSWGIQKVREDNDRHHAVDAVVVACSTRALQKKITDYVRYKEMNVFTGEKIDQETGEIIKFHFPEPWKFFRQEVEIRVFSETPAEDVVIALPDRPQANHEFIQPLFVSRAPTRKMTGQGHMETIKSAKRLAEGLSVSRVPLTQLKLKDLENMVNREREKALYEALKVRLEKFNNDPAKAFADPFYKKGGQQVKAVRVEQVQKSGVLVRQENGVADNASMVRVDVFIKGGKYFLVPIYTWQVAKGILPNRAATQGKEEEYWDIMDETAIFQFSLYQNDLIKLVTKKKTIFGYFNGLNRATSNINIKEHDLDKSKGKDGIYLEVGVKLALSLEKYQVDELGKNIQPCRSMKKRPPVR

SEQ ID NO: 107 - protein, 1081 aa, Neisseria flavescens
MTAFKPNPINYILGLDIGIASVGWAMVEIDEEENPIRLIDLGVRVFERAEVPKTGDSLAAARRLARSVRRLTRRRAHRLLRARRLLKREGVLQAADFDENGLIKSLPNTPWQLRAAALDRKLTPLEWSAVLLHLIKHRGYLSQRKNEGETADKELGALLKGVADNAHALQTGDFRTPAELAVNKFEKESGHIRNQRGDYSHTFSRKDLQAELVLLFEKQKEFGNPHISDGLKEGIETLLMAQRPALSGDAVQKMLGYCTFEPTEPKAAKNTYTAERFIWLTKLNNLRILEQGSERPLTDTERATLIDMPYKNKLTYAKARELLGLDDTAFFKGLRYGKDNAESATLMEMKAYHAIRRALEKEGLKDKKSPLSLSPELQDEIGTAFSLFKTDEDITGRLKGCLQPEILDALLKHINFDKFVQISLKALRRIVPLMEQGKRYDEACAETYGDHYGEKNSEEMLYLPPIPADEIRNPVVLRALSQARKVINGVVRRYGSPARIHIETAREVGKSFKDRKEIEKRQEENRKDREKAAAKFREYFPNFVGEPKSKDILKLRLYEQQHGKCLYSGKAIDIRRLNGKGYVEIDHALPFSRTWDDSFNNKVLVLGSENQNKGNRTPYEYLNGKDNSREWLEFKARVETSRFPHSKKQRVLLQKFDEKGFKERNLNDTRYVNRFLCQFVADHMQLTGKGKRRVFASNGQITNLLRGFWGLHKVRAENDRHHALDAVVVACSTVAMQQKITCFVRYKEMNAFDGKTVDKETGEVLHQKTHFPQPWEFFAQEVMIRVFGKPDGKPEFEEADTPEKLRALLAEKLSSRPEAVHEYVTPLFVSRAPNRKMSGAHKDTLRSAKRFVKHNEKISVKRVWLTEIKLADLENMVNYKNGREIELYEALKARLGAYGGNAKQAFDPKDNPFYKKGGQLVKAVRVEKTQESGVLLNKKNAYTIADNGDMVRVDVFCKVDKKGKNQYFIVPIYAWQVAENILPDIDCKGYRIDDSYTFCFSLHKYDLIAFQKDEKSKVEFAYYINCDSSNGRFYLAWHDKGSKEQQFRISTQNLVLMQKYQIDELGKEIRPCRLKKRPPVR

SEQ ID NO: 108 - protein, 1392 aa, Gemella haemolysans
MANKTWYLGLDIGSASVGWAATDTGYKIIRKNKKRLWGVRLFEEAKTAEDRRGYRSSRRRLARRKWRLNLLEELFTSEVKKVDENFFLRLKESQYHYEDKTHKVPYAIFNDKDYTDKDYYKDYPTIYHLRSKLMTEENPDIRKVFLAIHHIIKNRGHFLLQGQSFKDGNLNNLIKELLELDILHVGFEVTEEVVDKIADISLEKKTSKDKLNDIKELYPKEKQLLEVFRLIFGGKTSLDKLFAIDEYKELDAAIKSVSFKEKIYEEVRHDYEQVLSNYIELLDLAKLVYDSIILSDIKKEGKTLSESKVELFEKHRDDLLKLKNLVKNDSKLSEDKKVELYALIFKEDKDKGTNYVNYIRKSEEGKGCNYEDFKKFLVKELAKLEESSVKTEIIKDLELEQFLPLQRTKDNSVVPYQIHKEELVKILDNAARYHSFLNEKDESGYNVREKVIQLLEFRIPYYVGPLNSSKKAKEGGFAWSVRNTGYENTPVTPWNYSKVIDESASAEKFITNLTNKCTYLKGEDVLPKSSLLYSEFALLNELNALKYDGNRISLEARNTIIEKLFKQQGKKVTKTSIKNLLKAEGYIDGKGEITGIDITVKNDLKSYRDFKKILGNKFNSEHVENIILWITLYGESRKLIKAKIESVYGEVYSKDEITKMSRLVYKDWGRFSRKLLTELVSKKLYNEETGECLNIIGAMRQNNILFMELLADRFDYSKQIVEFNKELQEDVTEIAPEILDDLYVSPAVKRSIWQTVRIVEELKKIIGCAPAKIFVETTRSNQEKKKPTDSRKKQLELAYKAVKKDVKELEKEIGTINFDVLNDRLSSVEPSKLKAKKLYLYYTQLGRCMYSEEPINISELFDNNKYDIDHIYPQSKIKDDSFTNTVLVKRESNAAKTDRYPLGSDIQTPSNRRFWKFLKEKGLISDEKYNRLVRTEEFSDEELSGFIARQLVETSQSVKAVASILGELNPETSICYSKAENVSSFRQNFGKIKKGDRDSKNNDQLIKVREINDYHHAKDAYLNVVVGNVYDTKFTRNVFNFIKDKKDGRKYSLNKVFYENVSDSKTVAWEMDKTIHQVEKVMNNNNIMVTRRTSEQKGGLFDATVYKAKVAAKAKDGVYYPLKTSNSVVKDVAKYGGYTSIGIAYYSIFEYTIVNKKGEEKITRIIPIPIYISQNIKDSTALIEFGKSQIFCRAYEKIKDFKLLYRKLCIGSKININNYQYYIGGKSDERFYYDSAIQVTLDKKSEKYLKILSKYQNWKKENKDGELWENITKENNIELYNKLVEKMNSEIFTKKKSNKYNELNSEEIRNNFIKISVEEQAKVLLEILNLLTNKKSIFDLKSIDIKAARGKISFNLTSLIQFSIIEQSITGFYEKEITIIGDKGNDMENNNS

SEQ ID NO: 109 - protein, 702 aa, Helicobacter pullorum
MRKILKIDERIQFKEVDYTAKNPENKKFVEFKNLKKFCEILGAIVGDRALADSIARDMTLIKDEEELAQKLRGYGKFSQEQITQLSALHFSHHISLSLKALSEILPFMREGMRYDEACQEAKLQAKHNDKKSKFLPPFCESIYADELTNPVVHRAIAEYRKILNALIAKYGSVHKIHIELTRDVGKNFQEREKYKKEIESNYKARVQAMQECEKLGLTLSEGNILKLRLFREQNEICVYSGRKITLANLKEQGALEIDHILPYSRSSDDSYMNKVLVFTNENQNKGNKTPYEAFGGDSQKWGEIESLALRSGYPKKKAKRILDKGFGDREAGFKSRNIVDSGYIARLIANYTKEYLKFLPLDSHENTALIAGEKDSKIHVEAVKGMLTATMRHFWGLGSKNRYEHTHHAVDAIIIAYINAAMIQRFSQFRQNQESLKARFYAKELAKEEFKTQRAFFEPFSGFREQVLAKVGQIFVSRPPRKRARGALHEETFYSIDDKKLSETYGGKKGVQRALSLGKIRQIGTKIVANGPMVRVDIFKHTQSGRFYAVPIYTMDFALGILPNKAVVSGKDKDRIIKDWLEMDSCYEFCFSLFKDDVIEVQKRDMEKPELAYFVSLDASDGRIKVRHHCNDITKINENQKKLFSEAIEKEVVGRGSIQNLKVFKKYKVSPLGEIKEAKYEPRQPIALKTSPKKHRKQNNAQ

SEQ ID NO: 110 - protein, 1371 aa, Streptococcus dysgalactiae
MDKKYSIGLDIGTNSVGWAVITDDYKVPSKKFKVLGNTDRHSIKKNLIGALLFDSGETAEATRLKRTARRRYTRRKNRIRYLQEIFSSEMSKVDDSFFHRLEESFLVEEDKKHERHPIFGNIVDEVAYHEKYPTIYHLRKKLADSTDKADLRLIYLALAHMIKFRGHFLIEGDLNPDNSDMDKLFIQLVQTYNQLFEENPINASRVDAKAILSARLSKSRRLENLIAQLPGEKRNGLFGNLIALSLGLTPNFKSNFDLAEDAKLQLSKDTYDDDLDNLLAQIGDQYADLFLAAKNLSDAILLSDILRVNSEITKAPLSASMIKRYDEHHQDLTLLKALVRQQLPEKYKEIFFDQSKNGYAGYIDGGASQEEFYKFIKPILEKMDGTEELLAKLNREDLLRKQRTFDNGSIPHQIHLGELHAILRRQEDFYPFLKDNREKIEKILTFRIPYYVGPLARGNSRFAWMTRKSEETITPWNFEEVVDKGASAQSFIERMTNFDKNLPNEKVLPKHSLLYEYFTVYNELTKVKYVTEGMRKPEFLSGKQKEAIVDLLFKTNRKVTVKQLKEDYFKKIECFDSVEISGVEDRFNASLGTYHDLLKIIKDKDFLDNEENEDILEDIVLTLTLFEDKEMIEERLKKYANLFDDKVMKQLKRRHYTGWGRLSRKLINGIRDKQSGKTILDFLKSDGFANRNFMQLINDDSLTFKEAIQKAQVSGQGHSLHEQIANLAGSPAIKKGILQSVKVVDELVKVMGHKPENIVIEMARENQTTQKGQKNSRERMKRIEEGIKELGSQILKEHPVENTQLQNEKLYLYYLQNGRDMYVDQELDINRLSDYDVDHIVPQSFIKDDSIDNKILTRSDKNRGKSDNVPSEEVVKKMKNYWRQLLNAKLITQRKFDNLTKAERGGLSELDKAGFIKRQLVETRQITKHVAQILDSRMNTKYDENDKLIREVKVITLKSKLVSDFRKDFQFYKVREINNYHHAHDAYLNAVVGTALIKKYTKLESEFVYGDYKVYDVRKMIAKSEQEIGKATAKRFFYSNIMNFFKTEITLANGEIRKRPLIETNEETGEIVWDKGRDFATVRKVLSMPQVNIVKKTEVQTGALTNESIYARGSFDKLISRKHRFESSKYGGFGSPTVTYSVLVVAKSKVQDGKVKKIKTGKELIGMTLLDKLVFEKNPLKFIEDKGYGNVQIDKCIKLPKYSLFEFENGTRRMLASVMANNNSRGDLQKANEMFLPAKLVTLLYHAHKIESSKELEHEAYILDHYNDLYQLLSYIERFASLYVDVEKNISKVKELFSNIESYSISEICSSVINLLTLTASGAPADFKFLGTTIPRKRYGSPQSILSSTLIHQSITGLYETRIDLSQLGGD

SEQ ID NO: 111 - protein, 1007 aa, Helicobacter canadensis
MKVLGFDIGINSIGWAFVENNELKDCGVRLFTKAENPKTKESLALPRRNARSSRVRLRRRRSRLLSLKHIISKEFGLHYEDYIALDGNLPKAYTGKIESIYKLRYEALSQAISKEDLARVILHIAKHRGYMNKNQKTSQDSEKGAILSAIKENSNKIKHYQTAGEYFYKELFENLRDGTKEFKNIRNKAMKNEKTGNMESTYYNTILASDLEKELKLILEKQQAYHNYSDTFIKEVLEIAFYQRPLKDFSHLVGSCTFYENEKRACKNSYSAWEFIALGKIINTLESIKKDTGEIFSNEIITQILKEVLDKGSLSYTKLRKMINLDEKVKFKGLKYDKEGVEKTNLIEFKKLKEFKKALGEHNLERKTLDEIATHITLTKDENQLKKQLEQYALSQNQIDALAELDFNDHINLSFKALYEILPLMEKGKRYDEACNELGLKAKTSNQKSEFLPAFCDSIFAQELTNPIVNRAISEYRKVLNRLLKKYGKMHKIHIELARDAGLSKEARNKIEKEQKENKDINDKAEKTCKEFGLKPNAKNILKIKLWREQGEICAYSGKKITIDDLKEDKALEVDHIYPYSRSYDDSYNNKVLVFIKENQLKLNQTPYEAFGSNQEKWSKIQVLAQKLPYKKKNRILDENFKNKDQIEFISRNLNDTRYATSLIAKYTKEYLEFLPLSDDEDISLKSGEKGSKTHVQTMNGMLTSVLRHAWGFSQKDRNNHLHHALDAIIIAYSTNSIIKAFSDFKKNQEILKAKLYAKKLTSEEYKNQSKFTGFEKYRSKILEKLDSIFVSKPPNKNTKGALHEQTFYSYQDILEEYKTQEGLKRALECGKVRKIGTKYVVNDRMVRLDIFKKDNKFYGIPIYTMDFALGVLPNKVVTIGTDKDKIKKEWKTIDETYEFCFSLYKGDLVLIQKKEMQESEFAYYNGFDISSASISLEKHDNKFENLTENQKLLFPKAKEGDVEVRGIGIQGLKVFKKYMVTPLGEIQETRTEARQNIQPRKKHGLR

SEQ ID NO: 112 - protein, 1397 aa, gamma proteobacterium
MTKNYISPIAIDLGAKFTGVALYQYLEGADCTQEVAKGLLVDDRGNVTWSQEGRRGKRHQVRGYKRRKMAKRLLWLILDSEYGIKREEVTEPLLKFINGLLNRRGYTYISEEVDEESMNVSPLPFSEMMPDYFNSSAPLLEQLAKLLSDKNKLVRFRAEGKIPSNKNEFKKLLDTALDGKYKDEKKELSEAWGNILIASENVLKSTVDGHKSRSEYLANIKEDIKSNEELEKQISSKEIDGFYNLVGHLSNFQLRLLRKYFNDPNMSGVSYWDEKRLEKYFYQWVQGWHTKGGTDEAEKKNIILKTKGAPLLKTLKSLSADLTIPPYEDQNNRRPPKCQSVLLSDEKLTMHYPKWKEWVGQLVKQNDNAYLNENVTLANALHRIVERSRSIDPYQLRLLISITDAEKRNDLAGYKRLKLSLGSEVDEFLLLVKNIVDETKEAREGLWFETENKLFFKCGKTPPRKEKLKSTLLSAVLGKNLSDDEQSSFIEEFWKSGTPKIERRNVRGWCRLASQVQKTYGVYLKEYGLQQLHKLEAGKKLDDKPLALLYKNSGLIASKIGEALNIEPDEVSRFASPHSLAQIFNIIEGDVAGFNKTCRACTYENIWRMQEEKVESLLTNQLLSEIHGERKVPLKSAMCTRLSADSTRPFDGQMASIIEHIARKIAQHKIAQINDVPKEFSIDIPIIIESNQFSFTAELEEIKRGRGSAKAKKAKELGEKSKAGWVSKTERIKTSSEGICPYTGAPLGGSGEIDHIIPRSLTGRTKKTVFNSEANLIYCSSKGNHDKGNRVYVIEQLNDKYLKKQFSTSDVNLIKKKIKTTIQRFTEGGEKLRSFSELSREDQKAFRHALFVPELKSEVTSLLAVKNITRVNGTQAWLAKKIASLLAEHLDKQGRDYTLSAHQIDPWSVSKQRKMLASAEPIWAKKDPQPAASHVVDAVCTFLEALEQPHTASRLKTISSTSFEKTGWRSALIPDLIKVDALDRRPKYRRYNIGSTSLFKDGIYAERFLPILIDENGLMAGYDIDNSLKAKGADVVFESLSPFLLFKGEEVGAQSLSDWQERIDGRYLYMSIDKVKAFDYLQEKVGEKDIAAELLNSIHFTQRKTELRAKFSDDSGKKMKTLDAIRKSLKLTVTVNEIGKRKEKCGFSGTIGIPAKSAWENLLDEPLLETYWGTKMPPQEIWEKVYRKHFPRNIPNQAHRKVRKDFSLPVVDSVSGGFRVKRKTPNGYNYQLLAIDGYSAVGFKKEGDNVDFKSPALVPQIAESKSVTPISSELVHLDKNEIVYFDEWRKIDISDSDLKQFVSSLELAPGSQNRFYIRFTVDEDQFERHFKSALRVNGIQDLDTVNKTFDWNREIPSLLIPPRSNLFLLETGQKITFEYIANGANAEVKKAYSLRRA

SEQ ID NO: 113 - protein, 1082 aa, Neisseria meningitidis
MAAFKPNPINYILGLDIGIASVGWAMVEIDEEENPIRLIDLGVRVFERAEVPKTGDSLAMVRRLARSVRRLTRRRAHRLLRARRLLKREGVLQAADFDENGLIKSLPNTPWQLRAAALDRKLTPLEWSAVLLHLIKHRGYLSQRKNEGETADKELGALLKGVADNAHALQTGDFRTPAELALNKFEKESGHIRNQRGDYSHTFSRKDLQAELILLFEKQKEFGNPHISGGLKEGIETLLMTQRPALSGDAVQKMLGHCTFEPAEPKAAKNTYTAERFIWLTKLNNLRILEQGSERPLTDTERATLMDEPYRKSKLTYAQARKLLGLEDTAFFKGLRYGKDNAEASTLMEMKAYHAISRALEKEGLKDKKSPLNLSPELQDEIGTAFSLFKTDEDITGRLKDRIQPEILEALLKHISFDKFVQISLKALRRIVPLMEQGKRYDEACAEIYGDHYGKKNTEEKIYLPPIPADEIRNPVVLRALSQARKVINGVVRRYGSPARIHIETAREVGKSFKDRKEIEKRQEENRKDREKAAAKFREYFPNFVGEPKSKDILKLRLYEQQHGKCLYSGKEINLGRLNEKGYVEIDHALPFSRTWDDSFNNKVLVLGSENQNKGNQTPYEYFNGKDNSREWQEFKARVETSRFPRSKKQRILLQKFDEDGFKERNLNDTRYVNRFLCQFVADRMRLTGKGKKRVFASNGQITNLLRGFWGLRKVRAENDRHHALDAVVVACSTVAMQQKITRFVRYKEMNAFDGKTIDKETGEVLHQKTHFPQPWEFFAQEVMIRVFGKPDGKPEFEEADTPEKLRTLLAEKLSSRPEAVHEYVTPLFVSRAPNRKMSGQGHMETVKSAKRLDEGVSVLRVPLTQLKLKDLEKMVNREREPKLYEALKARLEAHKDDPAKAFAEPFYKYDKAGNRTQQVKAVRVEQVQKTGVWVRNHNGIADNATMVRVDVFEKGDKYYLVPIYSWQVAKGILPDRAVVQGKDEEDWQLIDDSFNFKFSLHPNDLVEVITKKARMFGYFASCHRGTGNINIRIHDLDHKIGKNGILEGIGVKTALSFQKYQIDELGKEIRPCRLKKRPPVR

SEQ ID NO: 114 - protein, 1334 aa, Listeria monocytogenes
MKKPYTIGLDIGTNSVGWAVLTDQYDLVKRKMKISGDSEKKQIKKNFWGVRLFEKGETAAKRRMSRTARRRIERRRNRISYLQEIFAIQMNEVDDNFFNRLKESFYAESDKKYNRHPFFGTVEEEVAYYKDFPTIYHLRKELIDSQKKADLRLVYLALAHIIKYRGHFLIEGALDTKNTSIDEMFKQFLQIYNQVFANDIEEASLKKTEKNQEVAQILAEKFTRKDKLDKILSLYPGEKTTGVFAQFVNIIVGSTGKFKKHFNLHEKKDINCAEDTYDTDLESLLAIIGDEFAEVFVAAKNAYNAVVLSNIITVTDSTTRAKLSASLIERFENHKEDLKKMKRFVRTYLPEKYDEIFDDTEKHGYAGYISGKTKQADFYKYMKATLEKIEGADYFIAKIEEENFLRKQRTFDNGVIPHQLHLEELEAILHQQAKYYPFLREDYEKIKSLVTFRIPYFVGPLAKGQSEFAWLTRKADGEIRPWNIEEKVDFGKSAVDFIEKMTNKDTYLPKENVLPKHSLCYQKYMVYNELTKVRYIDDQGKTNYFSGQEKQQIFNDLFKQKRKVKKKDLELFLRNINQIESPTIEGLEDSFNASYATYHDLLKVGMKQEILDNPLNTEMLEDIVKILTVFEDKRMIKEQLQQFSDVLDGTVLKKLERRHYTGWGRLSAKLLVGIRDKQSHLTILDYLMNDDGLNRNLMQLINDSNLSFKSIIEKEQVSTTDKDLQSIVAELAGSPAIKKGILQSLKIVDELVSVMGYPPQTIVVEMARENQTTNKGKNNSKPRYKSLEKAIKEFGSQILKEHPTDNQELKNNRLYLYYLQNGKDMYTGQELDIHNLSNYDIDHIVPQSFITDNSVDNLVLTSSAGNREKGDNVPPLEIVQKRKIFWEKLYQGNLMSKRKFDYLTKAERGGLTEADKARFIHRQLVETRQITKNVANILHQRFNYKTDGNKDTMETVRIVTLKSALVSQFRKQFQFYKVREVNDYHHAHDAYLNGVVANTLLKVYPQLEPEFVYGEYHQFGWFKANKATAKKQFYTNIMLFFAQKDRIIDENGEILWDKRYLETVKKVLGYRQMNIVKKTEIQKGEFSNVTPNPKGKSNKLIPRKKDWDPIKYGGFDGSKMAYAIIIEYEKQKRKVRIEKKLIQINIMEREAFEKDEKTFLEEKGYHQPKVLIKVPKYTLYECKNGRRRMLGSANEAHKGNQMLLPNHLMALLYHAEKYEAIDGESLAYIEVHRALFDELLAYISEFARKYTLSNDRLDEINMLYERNKDGDVKSIAESFVSLKKFNAFGVHQDFSFFGTKIERKRDRKLNELLNSTIIYQSITGLYESRKRLDN

SEQ ID NO: 115 - protein, 1337 aa, Enterococcus faecalis
MKKDYVIGLDIGTNSVGWAVMTEDYQLVKKKMPIYGNTEKKKIKKNFWGVRLFEEGHTAEDRRLKRTARRRISRRRNRLRYLQAFFEEAMTALDENFFARLQESFLVPEDKKWHRHPIFAKLEDEVAYHETYPTIYHLRKKLADSSEQADLRLIYLALAHIVKYRGHFLIEGKLSTENISVKEQFQQFMIIYNQTFVNGESRLVSAPLPESVLIEEELTEKASRTKKSEKVLQQFPQEKANGLFGQFLKLMVGNKADFKKVFGLEEEAKITYASESYEEDLEGILAKVGDEYSDVFLAAKNVYDAVELSTILADSDKKSHAKLSSSMIVRFTEHQEDLKKFKRFIRENCPDEYDNLFKNEQKDGYAGYIAHAGKVSQLKFYQYVKKIIQDIAGAEYFLEKIAQENFLRKQRTFDNGVIPHQIHLAELQAIIHRQAAYYPFLKENQEKIEQLVTFRIPYYIGPLSKGDASTFAWLKRQSEEPIRPWNLQETVDLDQSATAFIERMTNFDTYLSSEKVLPKHSLLYEKFMVFNELTKISYTDDRGIKANFSGKEKEKIFDYLFKTRRKVKKKDIIQFYRNEYNTEIVTLSGLEEDQFNASFSTYQDLLKCGLTRAELDHPDNAEKLEDIIKILTIFEDRQRIRTQLSTFKGQFSAEVLKKLERKHYTGWGRLSKKLINGIYDKESGKTILGYLIKDDGVSKHYNRNFMQLINDSQLSFKNAIQKAQSSEHEETLSETVNELAGSPAIKKGIYQSLKIVDELVAIMGYAPKRIVVEMARENQTTSTGKRRSIQRLKIVEKAMAEIGSNLLKEQPTTNEQLRDTRLFLYYMQNGKDMYTGDELSLHRLSHYDIDHIIPQSFMKDDSLDNLVLVGSTENRGKSDDVPSKEVVKDMKAYWEKLYAAGLISQRKFQRLTKGEQGGLTLEDKAHFIQRQLVETRQITKNVAGILDQRYNANSKEKKVQIITLKASLTSQFRSIFGLYKVREVNDYHHGQDAYLNCVVATTLLKVYPNLAPEFVYGEYPKFQAFKENKATAKAIIYTNLLRFFTEDEPRFTKDGEILWSNSYLKTIKKELNYHQMNIVKKVEVQKGGFSKESIKPKGPSNKLIPVKNGLDPQKYGGFDSPVVAYTVLFTHEKGKKPLIKQEILGITIMEKTRFEQNPILFLEEKGFLRPRVLMKLPKYTLYEFPEGRRRLLASAKEAQKGNQMVLPEHLLTLLYHAKQCLLPNQSESLAYVEQHQPEFQEILERVVDFAEVHTLAKSKVQQIVKLFEANQTADVKEIAASFIQLMQFNAMGAPSTFKFFQKDIERARYTSIKEIFDATIIYQSTTGLYETRRKVVD

SEQ ID NO: 116 - protein, 1426 aa, Capnocytophaga ochracea
MKNILGLDLGTTSIGFAHIVEDENKEKSEIKELGVRIVSLTTDEQSDFEKGKSITTNANRTLKHGARLNLDRYQQRRKYLIDLLQKANLITPSSILAENGKNTTHSTWQLRAKAVTERIEKEEFARILLAINKKRGYKSSRKAKTEDEGQAIDGMAIAKRLYDENLTPGQLSLQLLQQNKKLLPDFYRSDLQKEFDLVWNFQKQFYPDILTDIFYKELQGKGKDATSKAFSKRYHFDTTENKGSKESVRLQAYQWRAEAISKQLSKEEVAYVLTEINNNLNNASGYLGAISDRSKELYFNRQTVGQYLYAKLQENRHNSLKNKVFYRQDYLDEFERIWETQASFHKELTDELKKQIRDVVIFYQRKPKSQKGLISFCEFESKEIEIEKDGKTITKNIGARVVPKSSPLFQEFKIWQILNNVICKRKGIRKKKISAKTTQLDLLNESSQTIFSLDMECKQLLFDELNLKGDLKSDKVLKLLGYSPQEWEINYNQLEGNRTQKALYEAYLKIVEMEAHDVKDILQIKSAKDDWSLDESPLSASEIREKVKAIFQTLGICTKILYFDPLLPVKEFEEQDSYQLWHLLYSYESDDSTSGNETLYRILEKKYAFKREHARILANVALQDDYGSLSTKAIRKIYPNIKENQYSTACEKAGYKHSKLSLTTEELEARELKNIIPLLKKNALRNPVVEKILNQMINVVNALIEKNSERDAEGKITKYFHFDEIRIELARELKKNAQKRYEMTQNINKAKLEHQKISEILQKEFGIKNPTKSDIIRYRLYQELEHNGYKELYTNAPIARDMLFSKNIEIEHIVPKARVFDDSFSNKTLTFHRINSDKGEYTAFDYITSLNSEEELNQYLTRVENAYKTKSISPTKYKNLLKKASEIGDDFINRDLRDTQYIAKKAKEILFQVTKNVLSTSGSITDRLREDWGLVDVMKELNMPKYQSLGLTEVEERKDGNKVTVIKNWTKRNDHRHHAMDALTVAFTKPSYIQYLNHLNARKDENNKNYSVILAIEEKETIKVPTNNGKNKRVFIEPIPNFRQVAKKHLEEIFISHKAKNKVVTKNTNKPAGTDKQQITLTPRGQLHKETIYGKYQYYINKEEKIGVKFDERTIAKVSNPVYREALLKRLQANDNDPKKAFAGKNALSKNPIYLDESKTKTLPEKVNLTYLEEDFSIRKDISPDNFKDLKSIEKVIDQGVKRILIKRLQAYDNDPKKAFVDLEKNPIWLNKEKGIAIKRVTISGVNNAQPLHIGKDHLGKTTLNKEGKEIPVDYVSTGNNHHVAIYRDKEGNLQEQIVSFFDAVVRAQQGIPIIDKTYKQAEGWQFLFTMKQNEMFVFPNATTGFNPAEIDLLDPKNKKLISPNLFRVQKIATKDYFFRHHLETNVETDNILKNVTWKREGLSGLKDIVKVRINHLGDIVSIGEY

SEQ ID NO: 117 - protein, 1424 aa, Parabacteroides sp.
MKRILGLDLGTNSIGWALVNEAETDEEVSSIIRLGVRVNPLTVDETQNFEKGKSITTNAERTLKRSMRRNLQRYKLRRDALVEFLKELGFITDETILSEQGNRTTFETCRLRAKAAEEEISLEELSRVLLMINKKRGYKSSRKVKKEEDGVLIDGMEIAKKLYEEDLTPGQLCSQLLESGKKVLPDFYRSDLQEELDRIWSVQKQFHPDVFCDAAKEEIKGKNRSQTWAILANYFVWKEEVVGWNDREAKNETIEKECKLVGLKRTTKGYELKKENYRWRAQALTEQLGLEEIAVVLQEINGQINASSGYLGAISDRSKVLYFNHQTVGQYQMAELDKNPHASLRNMVFYRQDYLDEFDRIWEKQAEFHKELTAELKKEIRDMIIFYQRRLKSQKGLISFCEFERLEIVVEKDGKKQTKVIGCKVIPRSHPLFQEFKVWQTLNDIKVLGREKKRNALSASESRALYPEEKEILARELAIKENMKKADVLKLLFENPQELDLNFKQIDGNRTGFSLFSAYSKMIEKYGYEPLDFKKPADEIIGQLRTIFTDLGWNTNLFTIDLTKEGKELEMQPYFRLWHLLYSFEGDNTSTGNGKLIEKIMQLCGVEKEYAVELASLSFQDDYGSLSAKAIKRILPYLKEGNLYDVACEYAGYRHSKSSLTKEEIENKVLKGKLEVLPKNSLRNPVVEKILSQMVNVINTIIDTYGKPDEIRVELARELKKSAKEREELTKAIAKSTREHEEIRKLLQDEFGMMNVSRNDIIRYKLYEELKDNGYKTLYSNQYIPKEKIFSKEIDIEHIIPQSRLFDDSLSNKTLEYKAINIEKGNKTAYDFVKEKYGEEGLQQYINRCESLFNDKKAKLRKLKMEQKDIPDGFIDRDLRNTQYIAKKALAMLNEICRRVVATTGSITDQLREDWQLVDVMKELNLPKYEALGFVETYEDKDGRKIKRIKDWTKRNDHRHHAMDALTVAFTKDAFIQYFNNKNAAQDSGNRNHTNIIGIKTRYFDKGRALPPIPLEQFRIEAKQHLEKLLVSIKAKNKVVTVNVNRTKKRKGENTKIQQTPRGQLHLETVYGSHKQYVTKIEKVNASFDAAKIATVSKRAYRNALLKRLETFGNDPKKAFTGKNALEKNPLYADKYQTIRVPEKVQTVEFETIYTIRKPVDPALNVDKVVDVKVRAILERRLKEYGGDPKKAFVNFWENPIWLNKEKGISIKRVSIRGINNAQSIHVKKDKNGNPIWDENGKQIPVDFVNTGNNHHVAIYRKPVLDKKGQVTFDEDGNLMYELDEVVVPFFEAVTRANLGLPIIDKDYRKSEGWQFLFSMKQNEYFVFPNEKTGFNPKEVDLLNPDNYAMISPNLFRVQTMSKVMYGNNVVRDYKFRHHLETTVKDMKELKDIAYKQYKTLSFGNSVVKIRINHIGQIVSVGEY

SEQ ID NO: 118 - protein, 1395 aa, Lactobacillus jensenii
MKEIKDYIIGLDIGTNSCGYVVTDKQNNILKLKGKTAIGARLFKEGQAAADRRSFRTTRRRLARRHWRLGLLEEIFDPEMEKIDPNFFRRLKESDYSPKDSRKQFNAIVFKSIKADKRFYKKYPTIYHLRNALMHDNQKHDLREIFMAVHHIVKYRGNFLREDSVNAFKAAKFSLRGEDGIGPVDKLNDLLKEIYSEYSPELATNNLSKIEDIIKDKNLYKQDKLKQVATLLIKEADSKDKAKLNKDIAKQVANSFMGYMFRLDTLFSLTDVDVKDYKLKFSDANIDESLDDLTSLLTDAQIEFVLELQSIYNTIVLNEIVPDGMSLSESMIKKYDDHKEDLKIFKEYIDSLSDQKKAKKLLSAYNLYVNYRKSDLVEAKNLFKNKKVGDKNFADVISNFEVFGKFVSDNLDDSELANKIKARLDLGEFLPKQRTNQNGVIPYQLHQVELTQILEKQGKYYPFLITPNPVESHRNNAPYEISELVSFRVPYYVGPLIDNQSIKDKQNKNKFAWMVRQKQGQITPWNLEEMVDTTESANQFIKRMTRKDTYLLAEDVLPKSSLVYQKFMILDELNRIKIDGKKLTSELKHDIFEKLFKKQKSINLDNLKNYLLVEGNIPGLIEGLSDGINFNNSFSTYIDYRNIFGDEIDNPNKQADFEKMIEWSTVFEDRKIFKRKLKEITWLTSEQIKQVSSKRYSGWGRLSKKLLTQITDENGVNILQRLWNEPETLTEVLANPVIKRKIVEANSSFTKAKDMKDILVEAYTSPQNKKAIRQVMRVVDDIIAAAHGKKPSQIAIEFAREDQDNPQMTKSRKAQLDQIYAKISDEFLDDAVKNELKNMKDNKPLAKDKVFLYFKQMGRDAYSGEKLSLDNLQDYDIDHIYPQSFIKDDSFDNRVLVQRAYNNGKSDNVPVLLFGNKIAAGLGITIRQMWKKWLELGLISKRKFNNLITDPEKISRNMASGFVNRQLVETSQVIKLVANILQAKLPDTEIIEVKASYNSILRKEFNLYKSREVNDYHHAIDAYLTTIVGNYLYQVYPKLRPYFVYGQFKKFGKAENQEDDPVKKIKKFNFIYQLIWGKDDAICISHTNQQVFSKKDIIDKLTTAYNFKYMNISHAVYTRNNNMFKQTLFPIIERTTAKTKSLIPKKLDRPTDIYGGYSNNNDAYLALVKVDKKRGSEYRVVGIPMRAAAMLKASKNYDEDLRKVIEPMVMFDKNGKAKRGIEGFRVLVGKMPFKQAVLDGNKKFMLTGTVDTPNLKQLVLSQQNMKYILDYIEDVDCRKHKFGDKVQNPDKCLLEVFDEIIEIVDKYFELFDSRDFREKLRNSRNKFIKLEASKKADTILAILKGLQAKSTRATIKELNISDFGRIITSSISPEAQLIYQSPTGLFERRVKVKDL

SEQ ID NO: 119 - protein, 1140 aa, Roseburia intestinalis
MRENGSDERRRNMDEKMDYRIGLDIGIASVGWAVLQNNSDDEPVRIVDLGVRIFDTAEIPKTGESLAGPRRAARTTRRRLRRRKHRLDRIKWLFENQGLINIDDFLKRYNMAGLPDVYQLRYEALDRKLTDEELAQVLLHIAKHRGFRSTRKAETAAKENGAVLKATDENQKRMQEKGYRTVGEMIYLDEAFRTGCSWSEKGYILTPRNKAENYQHTMLRAMLVEEVKEIFSSQRRLGNEKATEELEEKYLEIMTSQRSFDLGPGMQPDGKPSPYAMEGFSDRVGKCTFLGDQGELRGAKGTYTAEYFVALQKINHTKLVNQDGETRNFTEEERRALTLLLFTQKEVKYAAVRKKLGLPEDILFYNLNYKKAATKEEQQKENQNTEKAKFIGMPYYHDYKKCLEERVKYLTENEVRDLFDEIGMILTCYKNDDSRTERLAKLGLVPIEMEGLLAYTPTKFQHLSMKAMRNIIPFLEKGMTYDKACEEAGYDFKADSKGTKQKLLTGENVNQTINEITNPVVKRSVSQTVKVINAIIRTYGSPQAINIELAREMSKTFEERRKIKGDMEKRQKNNEDVKKQIQELGKLSPTGQDILKYRLWQEQQGICMYSGKTIPLEELFKPGYDIDHILPYSITFDDSFRNKVLVTSQENRQKGNRTPYEYMGNDEQRWNEFETRVKTTIRDYKKQQKLLKKHFSEEERSEFKERNLTDTKYITTVIYNMIRQNLEMAPLNRPEKKKQVRAVNGAITAYLRKRWGLPQKNRETDTHHAMDAVVIACCTDGMIQKISRYTKVRERCYSKGTEFVDAETGEIFRPEDYSRAEWDEIFGVHIPKPWETFRAELDVRMGDDPKGFLDTHSDVALELDYPEYIYENLRPIFVSRMPNHKVTGAAHADTIRSPRHFKDEGIVLTKTALTDLKLDKDGEIDGYYNPQSDLLLYEALKKQLLLYGNDAKKAFAQDFHKPKADGTEGPVVRKVKIQKKQTMGVFVDSGNGIAENGGMVRIDVFRVNGKYYFVPVYTADVVKKVLPNRASTAHKPYGEWKVMEDKDFLFSLYSRDLIHIKSKKDIPIKMVNGGMEGIKETYAYYIGADISAANIQGIAHDSRYKFRGLGIQSLDVLEKCQIDVLGHVSVVRSEKRMGFS

SEQ ID NO: 120 - protein, 992 aa, Treponema vincentii
MQKNSGEDENCGFEFLTEEEKELIKPLFFRISKPSFQFADIEKKLKGKNGFWKFNYRKDTNVSGCPVSAGLKNIFGDEASAESWKDKKVGQYDMCDIWHVLFDFDDEEKLLEFAKRKLFLSDEAAKKFCAIRIQQGYANLSLKAIRKITPFLRKGYIYSTAVFLANIPFMIGRDIFLQNEKEIEDSVKNIIGTLRDKNNIIVLANRCIESAFKDKDNDFRFEEWDKALVENSAWDLFGKKKWNEYDEEKRKTIISQVSEKVEDNLKIAVGKNPNDYKYPLLRTDDLIMDYLNQKGFVVKGELYHPSDTDYNFETPVPAEDGKIYLASPRSPSVKNPVVMRALHQLRKLVNYLIKTGKIDSTTKINVELANDVNDKNQRKAIEELAKTNEKNNADARKKIEELCNEAGFKVVPTESDIKKFRLWKEQNETCPYTGKHISFTDLFGPIPKFDFEHTIPRSLSYDDSLENLTLCDSEFNRNIKKQRLPSELPDFEEINKRFLKFYEDKIDNCLRIIELNSKSGGSYEEPAVKDLRIVKKHKAQYELNYYKEKLRRFSSTEITSGFKHSQLNDTRIITKFSLSYLKGVFDHVQPVKGSMTDTFKRQWGLMERNEIKDRSNHTHHTVDALTVACINRGKFNLLSEAIKNSSDGKHLKFPKPWETFDTDVLNAVRYIIPKYFSDESSLRQSKKILRGRDGKPVLKNGKAVFIQGATARGSLHKDTFYGCIKTVPEKGGKSEMIFVQRIPVSTLDEKVAEKIIDKRIRKTFEKNLSTGIQTLQEIQTDGILLPFKKEGRDVFVKRVRIKAHPTSPIILKKHHNVINKNPKDYKQNYYVENEENYLLAIYRGKDAKGKDVSDHKLCNLLNAVKSRQNKTGFYPDFKEKKGINLQLYKVLKIGKIVILQNDIQEDVFALPKEKLWKRMYRIAGLATSRNDIQIKLVHIIRETPWGYMKGEKDLNAGKECLLYGTANFKGLVEGQDFTVSPAGEIIQKARVC

SEQ ID NO: 121 - protein, 1340 aa, Enterococcus faecium
MKKEYTIGLDIGTNSVGWSVLTDDYRLVSKKMKVAGNTEKSSTKKNFWGVRLFDEGQTAEARRSKRTARRRLARRRQRILELQKIFAPEILKIDEHFFARLNESFLVPDEKKQSRHPVFATIKQEKSYHQTYPTIYHLRQALADSSEKADIRLVYLAMAHLLKYRGHFLIEGELNTENSSVTETFRQFLSTYNQQFSEAGDKQTEKLDEAVDCSFVFTEKMSKTKKAETLLKYFPHEKSNGYLSQFIKLMVGNQGNFKNVFGLEEEAKLQFSKETYEEDLEELLEKIGDDYIDLFVQAKNVYDAVLLSEILSDSTKNTRAKLSAGMIRRYDAHKEDLVLLKRFVKENLPKKYRAFFGDNSVNGYAGYIEGHATQEAFYKFVKKELTGIRGSEVFLTKIEQENFLRKQRTFDNGVIPHQIHLSELRAIIANQKKHYPFLKEEQEKLESLLTFKIPYYVGPLAKKQENSPFAWLIRKSEEKIKPWNLPEIVDMEGSAVRFIERMINTDMYMPHNKVLPKNSLLYQKFSIYNELTKVRYQDERGQMNYFSSIEKKEIFHELFEKNRKVTKKDLQEFLYLKYDIKHAELSGIEKAFNASYTTYHDFLTMSENKREMKQWLEDPELASMFEEIIKTLTVFEDREMIKTRLSHHEATLGKHIIKKLTKKHYTGWGRLSKELIQGIRDKQSNKTILDYLINDDDFPHHRNRNFMQLINDDSLSFKKEIKKAQMITDTENLEEIVKELTGSPAIKKGILQSLKIVDEIVGIMGYEPANIVVEMARENQTTGRGLKSSRPRLKALEESLKDFGSQLLKEYPTDNSSLQKDRLYLYYLQNGRDMYTGAPLDIHRLSDYDIDHIIPRSFTTDNSIDNKVLVSSKENRLKKDDVPSEKVVKKMRSFWYDLYSSKLISKRKLDNLTKIKLTEEDKAGFIKRQLVETRQITKHVAGILHHRFNKAEDTNDPIRKVRIITLKSALVSQFRNRFGIYKVREINEYHHAHDAYLNGVVALALLKKYPQLAPEFVYGEYLKFNAHKANKATVKKEFYSNIMKFFESDTPVCDENGEIFWDKSKSIAQVKKVINHHHMNIVKKTEIQKGGFSKETVEPKKDSSKLLPRKNNWDPAKYGGLGSPNVAYTVAFTYEKGKARKRTNALEGITIMEREAFEQSPVLFLKNKGYEQAEIEMKLPKYALFELENGRKRMVASNKEAQKANSFLLPEHLVTLLYHAKQYDEISHKESFDYVNEHHKEFSEVFARVLEFAGKYTLAEKNIEKLEKIYKENQTDDLAKLASSFVNLMQFNAMGAPADFKFFDVTIPRKRYTSLTEIWQSTIIHQSITGLYETRIRMGK

SEQ ID NO: 122 - protein, 1363 aa, Lactobacillus rhamnosus
MTKLNQPYGIGLDIGSNSIGFAVVDANSHLLRLKGETAIGARLFREGQSAADRRGSRTTRRRLSRTRWRLSFLRDFFAPHITKIDPDFFLRQKYSEISPKDKDRFKYEKRLFNDRTDAEFYEDYPSMYHLRLHLMTHTHKADPREIFLAIHHILKSRGHFLTPGAAKDFNTDKVDLEDIFPALTEAYAQVYPDLELTFDLAKADDFKAKLLDEQATPSDTQKALVNLLLSSDGEKEIVKKRKQVLTEFAKAITGLKTKFNLALGTEVDEADASNWQFSMGQLDDKWSNIETSMTDQGTEIFEQIQELYRARLLNGIVPAGMSLSQAKVADYGQHKEDLELFKTYLKKLNDHELAKTIRGLYDRYINGDDAKPFLREDFVKALTKEVTAHPNEVSEQLLNRMGQANFMLKQRTKANGAIPIQLQQRELDQIIANQSKYYDWLAAPNPVEAHRWKMPYQLDELLNFHIPYYVGPLITPKQQAESGENVFAWMVRKDPSGNITPYNFDEKVDREASANTFIQRMKTTDTYLIGEDVLPKQSLLYQKYEVLNELNNVRINNECLGTDQKQRLIREVFERHSSVTIKQVADNLVAHGDFARRPEIRGLADEKRFLSSLSTYHQLKEILHEAIDDPTKLLDIENIITWSTVFEDHTIFETKLAEIEWLDPKKINELSGIRYRGWGQFSRKLLDGLKLGNGHTVIQELMLSNHNLMQILADETLKETMTELNQDKLKTDDIEDVINDAYTSPSNKKALRQVLRVVEDIKHAANGQDPSWLFIETADGTGTAGKRTQSRQKQIQTVYANAAQELIDSAVRGELEDKIADKASFTDRLVLYFMQGGRDIYTGAPLNIDQLSHYDIDHILPQSLIKDDSLDNRVLVNATINREKNNVFASTLFAGKMKATWRKWHEAGLISGRKLRNLMLRPDEIDKFAKGFVARQLVETRQIIKLTEQIAAAQYPNTKIIAVKAGLSHQLREELDFPKNRDVNHYHHAFDAFLAARIGTYLLKRYPKLAPFFTYGEFAKVDVKKFREFNFIGALTHAKKNIIAKDTGEIVWDKERDIRELDRIYNFKRMLITHEVYFETADLFKQTIYAAKDSKERGGSKQLIPKKQGYPTQVYGGYTQESGSYNALVRVAEADTTAYQVIKISAQNASKIASANLKSREKGKQLLNEIVVKQLAKRRKNWKPSANSFKIVIPRFGMGTLFQNAKYGLFMVNSDTYYRNYQELWLSRENQKLLKKLFSIKYEKTQMNHDALQVYKAIIDQVEKFFKLYDINQFRAKLSDAIERFEKLPINTDGNKIGKTETLRQILIGLQANGTRSNVKNLGIKTDLGLLQVGSGIKLDKDTQIVYQSPSGLFKRRIPLADL

SEQ ID NO: 123 - protein, 1234 aa, Prevotella tannerae
MPNFWSIFTENLQTYLMKTRILGLDTGTNSLGWAVVDRDENNQYTPICRGDLIFTEGVKQEKGIEFSLAAERTSYRASRRHYFRRRLRKVEVLKVLVKHKLCPPLSDEALNRWHTKKEYPLDEDFILWQRTNEADNKNPYHDRHICLHRKLNLKDSQTDRYTLGRALYHLTQRRGFLSNRLDQNEEAEETGKVKSAISELSKEMKEAGCEFLGDYFYLLYRTEGNRVRIRSRYTDREKHYLQEFKEICRVQELDEDLAKALEKTIFFQRPLKSQRQGVGKCTMEKGHSRCAVSHPLYEEYRLLCYLNNIRIKTPSDDRLRPLNAEEREKITPLFYKEKNFDFEKIAKKLAGKTPFGWIRDAEDWPYQFNYRMTQEAPACPTTAQLIKVFGEDWKAALAETYTMSAKQDGTLKTEDEICTDIWNVLYSFSSKEKLKEFGLKKLQLDEVQAKAFSEIRLTRDFASLSLKAIRKILFFLRTGEDYSKAIFLANIPTIVGEEIWNDIERRSRLLYKVDLALRPQEERDAEEHRTIAERIKAAVAAEVPDAPIDLLYHPSMIEAYPDAKRNERFDCYQLGSPKTNAVRNPMAMRSLHMVRKVINHLLRKHIIDEKTEIHIEYARELNDANKRQAIADWQRELSKRHTAYAQNIRQLYKAETGLVIEPTKADILKYQLWEEQQHVCLYTGKKIGIADFLGANPKFDIEHTIPRSRGGDSTQENLTLCESKFNRDIKRDKLPTELANYEEILARIEHWKKQCYALKLKRDGIRTHSGLEKSIKDSRIRRRHLVGLEYGYLKGKYDRFTMKEVPEGFSRRQGAGIGLISKYAGLFLKSLFKDPKNPNRSNVYVVKGAITAEFRKLWGLQQADEAKSRENHTHHCIDAYTIACIGPCEYAALAAYYRSDEEFKYGRRREKPQFEKPWPTFTEDLLKLQEELLIVHQTTDKLGKRDRRKVKTPRGKFLTGGDSARGRLHQETYYGAINYDGNIKYVVRKPLDSLTEKDLDKIVDETVMGIVKGAVEAKGSLKEALADGIYMNKEKGILIKRVRIFSDVSEPINLKQLRDVSTKEYKRHIHLRKDENYLFAIYEGIDKKKNKKQTETATVDYLDAAKFYKDSKRRDKANSLVGDYSKKNKLPLKCILKKRQMVLFYEHSPEEIRFKDKKDLSRRLYIVTSIAKDGRVKFLHHQAATATGIQSSPSPFTNDGEHQPYYRLSASNIKVLVAGIDFDINILGEITPKL

SEQ ID NO: 124 - protein, 1496 aa, Prevotella veroralis
MKTILGLDLGTNSIGWAKVCVDDNGNYLRDIKLGSRIIPMSQDVLGNFDKGVTESQTSVRTGFRGVRRIRERSLLRRERLHRVLHVLGYLPPHYDSAIGWNKNEPSTYGKFLNHGEPKLAWEHKEDGSMRFLFMESFHEMMADFAKSQPSLVSDGKKIPLDWTIYYLRKKALSQPIRKEELAWLLLNFNQKRGYYQLRGEEDDDNPTKCEEYYELKVVGIEADEEGKNGNTWYNVKLENGWIYRRQSKIPLDDWIGKVREFIVTTEYEKDGITLKKDKNGDVKRSFRSPSEDDWGLRKKRTEKLLDSSKMTVGAFVYDHLLAEPSDKIRGKFIRTIERKYYKKELYAILCEQSKYHEELRSGDYLNKCAEELYKNNQPHRNSLLTKDLAYLLLEDLIFYQRPLKTKKSLIAECPYEAYKYVDKETGEIKRQGIKCIAKSNPYYQEFRLWQFISNLRLFNKADDKEVTADYLPTQDDYVRLFAYLNDRKEINQETLLKEFFKLKKITVNSEKVFPIRWNYIEDKEKKYPCNETRHELLLALDRARIDHSWLEKPGQEYRLWHLLYSVESKEETKEALRKLKDDDAFVESFLKVKPFKREYGAYSEKAIKKLLAVMRMGSLWRETDICDTTKGNITKILQGEIDEKLKEKISASVSSYNQLSDFQGLPVWLACYVVYGRHSEAAEIQHWKTPESLLAYINGFKQHSLRNPIVEQCILETLRTVHDIWKEVGHIDEIHVELGRNMKSTADQRARISENVLRNENTNLRIKSLLLELKNDPNIKDVRPYSPMQQEKLRIYEEGVLQELTKDDKDFTEITKISTMAQPSAKELQRYKLWLEQKYRSPYTGKSISLTKLFTSAYQIEHVIPQSRYFDDSFSNKVICESEVNSLKDNMLGYEFIKNHGGEIIHCTMLGDVKVLSESEYKAFVNDHYAHNKRKRENLLLEDIPQEFLNRQMNDSRYISKVVKALLSNIVRAEGEEEATSKFVVSCSGGITDRLKKDWGLNDVWNKIVYPRFERLNRLTGTEAFGQWENKDGKRVFQTAVPLELQRGFNKKRIDHRHHAMDALVIACTSRNIINYLNNESANNPKKREDLRQKLCDKNRTIRKPWETFTQDATAALEDVIVSFKNYVRIINKATNYYERYDVEGKKVIAEQRGDDMWAIRKPMHEATYYGRVNLRRKKKVNLRVALENISSICDNKLRIYINGLVEKGFNTKQILDKFKNTNDHFSMQKIDKVEIWQFTNEEEKLVATRKPLDTSFDTKKIASITDTGIQTILLNYLETKGGDSTIAFTPEGIVEMNQNISKYNNGKEHMPILKVRLYTKLGKKIPVGQTGCKAKQFVIAEAGTNLYFAIYEDEEGKRSYRTIPLNEVVERLKQGLSPVPEKNDKDVHLKFYLSPNDLVYVPIEDEHESLAKDHIYKFVDSSGTTANFIPHRSANVIFELNKKDAEKFCSGSIIQNEYGVGSSQSKNQKAITGEMIKAVCRKLEVDRLGNVIKVI

SEQ ID NO: 125 - protein, 1082 aa, Neisseria cinerea
MAAFKPNPMNYILGLDIGIASVGWAIVEIDEEENPIRLIDLGVRVFERAEVPKTGDSLAAARRLARSVRRLTRRRAHRLLRARRLLKREGVLQAADFDENGLIKSLPNTPWQLRAAALDRKLTPLEWSAVLLHLIKHRGYLSQRKNEGETADKELGALLKGVADNTHALQTGDFRTPAELALNKFEKESGHIRNQRGDYSHTFNRKDLQAELNLLFEKQKEFGNPHVSDGLKEGIETLLMTQRPALSGDAVQKMLGHCTFEPTEPKAAKNTYTAERFVWLTKLNNLRILEQGSERPLTDTERATLMDEPYRKSKLTYAQARKLLDLDDTAFFKGLRYGKDNAEASTLMEMKAYHAISRALEKEGLKDKKSPLNLSPELQDEIGTAFSLFKTDEDITGRLKDRVQPEILEALLKHISFDKFVQISLKALRRIVPLMEQGNRYDEACTEIYGDHYGKKNTEEKIYLPPIPADEIRNPVVLRALSQARKVINGVVRRYGSPARIHIETAREVGKSFKDRKEIEKRQEENRKDREKSAAKFREYFPNFVGEPKSKDILKLRLYEQQHGKCLYSGKEINLGRLNEKGYVEIDHALPFSRTWDDSFNNKVLALGSENQNKGNQTPYEYFNGKDNSREWQEFKARVETSRFPRSKKQRILLQKFDEDGFKERNLNDTRYINRFLCQFVADHMLLTGKGKRRVFASNGQITNLLRGFWGLRKVRAENDRHHALDAVVVACSTIAMQQKITRFVRYKEMNAFDGKTIDKETGEVLHQKAHFPQPWEFFAQEVMIRVFGKPDGKPEFEEADTPEKLRTLLAEKLSSRPEAVHKYVTPLFISRAPNRKMSGQGHMETVKSAKRLDEGISVLRVPLTQLKLKDLEKMVNREREPKLYEALKARLEAHKDDPAKAFAEPFYKYDKAGNRTQQVKAVRVEQVQKTGVWVHNHNGIADNATIVRVDVFEKGGKYYLVPIYSWQVAKGILPDRAVVQGKDEEDWTVMDDSFEFKFVLYANDLIKLTAKKNEFLGYFVSLNRATGAIDIRTHDTDSTKGKNGIFQSVGVKTALSFQKYQIDELGKEIRPCRLKKRPPVR

SEQ ID NO: 126 - protein, 1512 aa, Fibrobacter succinogenes
MKKILGLDLGTNSIGWAVVNADEITRDDGSRYLKPNGISAAGSRIIPMSADILGDFEKGNSISQTAERTRMRMARRLHERALLRRERLLRVLNLLDFLPKHFADKIDRYGKFTDDSEPKLAWRKNTEGKYEFIFQDAFNEMLAEFKDKQPEIVEEGKKIPYDWTIYYLRKKALEKALSKEELSWILLQFNQKRGYYQLRGEEEEIPQDKKIEYLAQKVVKVEATDQKKGDDVWYNVYLENGMIYRRTSKAPLDWEGKVKEFIVTTEVENDGETPKKDKEGNIKRSFRAPKEDDWTLLKKKTEADIENSHKTVGCYIYDSLLNNPKQKIIGKLVRTVERKFYKEELTQILKKQVELIPELRDDNLYKQCIEELYPINEAHRNTIAKTDFANLFINDILFYQRPLKSKKSQIDNCPYEERIFIDSKTGEKKKVPVKCIAKSNPLFQEFRLWQFIQNLRIYQREKEIDGKLLTDIDITSECLKSEEDYVRLFDWLNDRETIEQEDLLKHLFNTKKSKNKENPYRWNYVEDKVYPCNETRATILKGFSKCGINASVLSPELEMALWHILYSVEDKKEIETALTHFAQKQGWNDDFAKVFSKAKPFKKDYGSYSEKAIKKLLSLMRMGKYWNQDNIDKNTLDRIDKIINGEYDEKISNRVRDNAINLKDISDFRGLPVWLACYIVYDRHSEAKDCTKWNSPEEIDSYLKKFKQHSLRNPIVEQVVTETLRTVRDIWIQEEQIDEIHLELGRDLKNPADKRKKMSENILKNENTNLRIKAMLMEFMNPSMGIENVRPYSPSQQDILRIYEENALDNLTKDDKDFDFISKISKQAQPSKTDIIRYKCWLEQKYRSPYTGKTISLSKLFTPAYEIEHVIPQSLYFDDSFSNKVICEAEVNKLKDRQLGYKFIAEHHGEKVQLSQGEVVEILSVDAYEKFVKENYANNRIKMKKLLMESIPDEFIERQLNDSRYISKVVKGLLSNIVREKIDDENYEPEAVSKNLISCNGAITDRLKKDWGMNDVWNSIILPRFIRMNQITGKDCFTTTNAEGHLIPQMPLELQKGFNKKRIDHRHHAMDAIVIACTTRDHVNLLNNEAAHSKFNATRYQLQRKLRRFEKAVIDGKEREVAKEFLKPWDSFSSDSKNILENIIVSFKQNQRVINKTTNAFLHFDENGKKTFIKQGKGDSWAIRKSMHKDTVFGEINLRKVRSVSLNEAIKVPERVLNKKIKEKILELKNNKIDAKNIKKYIEENHTGGYGIDSSKIDVFYFTKETKERFFATRKTLDTSFNQAKIKDSIADSGIQKILLAHLKSKNGDAEQAFSPDGIDEMNKNIVELNNGKFHQPILKVRVYEKADKFAVGQKGNKKVKFVEAAKGTNLFFAIFEKDGKRSYLTIPLNVMIDCQKQYGNQWKNNIEAYLKEKELVEKDVKLQFILSPNDLVYLPTEGSIDKKRIYKVVSFTNNRLYAIPYAIAKSIVDKNEFTQLNKIEFTDNKESIKDACVPVIIDRLGNVIEFNGKRL

SEQ ID NO: 127 - protein, 1259 aa, Streptobacillus moniliformis
MKYILGLDLGVASIGWAVTEINEKGEPVGLIDANSVIFKPLDNDKGKLYNVERRDKRGSRRILRRKKHRVERTKMLLVNSSFLTNEEIDNLYVGKLDNIYEVRLKGLKEQLSKNEIARLMIYYCKNRGFKSNRKTEDLEILKSLGEKISEKDSDEKKLKPIIAKNTELIESKGLTPIEVIYMIRENDNSILGFKNKEGNYKFGFKRNQVIDEVRKILGTQQILSKEIVDEYIDILSSQRDFSDGPGGDSKYKIDYTKLAGKCKYTGEVRAVKSAPSYEIFTMLQKLNDIRYVKFTSEDKIEKKKLSKEVIHKLYDLVVEKNKTLTYDLIEKSIDEENIKLLNIPKLSKSKYVELRKSYFKERNDNENLTEEEINAFNEKLNNERMKQELIRNNLKAYKELKSKFKKNNIDENRIKELGGIYFLDLVAELLTYSKTDEKLEYFVENVERYSLFKEQRDIVEIIKTFPNYTKNGNLSLSLVRELNKLLMEGHDYESSLSSLNYYIDTDVDWEKFPTISEIEDSLSTKITNPNVKHILVILRKLYNTLLFKYGRPEKVHLELSRDFSNDFSTRNKIQKEQLENKVRREVAAFEMYGANKDIVAGKDRLSNDDFVRIKLWEEQNKVCMYSGRTIEKYQLTSAEVQIDHILPYSKSFDNSYSNKVLVFSNENQDKKERTPYQWLKGTEKWNEFKQRVRLNLNISNKKKENLLFEDEVVNNEFLERELHATSYSSRLALNIFQRLIPVSDEDKYDEHGNEKVKYLYNRNVIAFQGKMTSMLRNLYSLNKYTHSFESDTLDIDNKAFILKEFEINKDNLKMTAYNVNTGLEITSETKVEKNKSGEFKTIKDELLKKELDKKENLIEISDYFKDKVLFDLKIVDFEEIDTVEPEIISILYKMITALKEEVYSKNRENHLHHSLDAFLLTIMNRSMQMKLIKYNQLISVLKNKEIEIFNEEKGEYIDSKEFAEELQKQKIIDIDGNERGIKFNVNGKTHRLNLVKPYENFLDDIKNKIFDKRENNKLPYHVVKSKVSGALHAETILGESKGEITKRISVFDINYKNLGKIFDKDGSQKEIYETLVKWLEAKSKDYPKLKNGNIIKKVKIVDGNKDKLIKLGNKRYVEMGRTTVKILVLKKEAEEGLKFASIGRYKYNLLKSEKDVNISIWKDAIHFCKVRYNKLKENGYRLIHELIPGETIELELNKGNISKCLVVGFSGGKIEISSVIGDALDLINDKISTRIKERYYITVSTIKSIKKINKNILGD

SEQ ID NO: 128 - protein, 1091 aa, Mobiluncus mulieris
MDSRKYRVGIDVGTNSVGFAAVEEDDSGSPTRFLNTMVVIHDSGVDPEQKKYAITRLASAGTARRTRRLYRTRRQRLRELDDFISNELGYPLVNLENFADPYEPWKVRADLATTKLPNDELPEAMSIALRHMARHRGWRSPYQRVEALHLHAEISKEFAALKERVVEKTGDVFSDDATPAEVLVDLMGRQKVRGADGVLSGKLRQSDNANELRKIASVQGIDDETLNRIIDRVFSSKSPKGKASERVGMDALPGQGSKPRALKAMPSFQKFRVVSVICNLRIKDSGGDARPLSMEEKEKLIDYLMSSTTDDHVTWTDVADLLHVKRSQLQGTAKEGFDGERPYTRPPVNSTWSKIKDSKIKSLVALWKTGDVDVQSAIVEALSNASVLEDSRPGADIVVAYLESLDDKELESLDKVGLPAGRASYSEDSLERLTERMLRDDCDLFEARKREFNVADDWKPPADPIYAPVGNPGVDRVLKIVNRLLMAAEREWGAPTQINIEHVRSGFSSELMQREFERENERRRAQNEEAVKAILTEKGGNSRVSKYDITRYYAVKRQHCQCLYCGTPITFSDCELDHIVPRKGVGSTNTRVNLAAACRSCNRDKSNLPFAVWAGKASNFDVSIDDAVSRVKQWQRSQNEGVREFRAFQNEVISRLLKTTEDPEIDSRSLESVAWMARELHHRVEYYFQSKGAQTQVSVYRGAVTAQARKSSGLEDKVKMIGGGGKTRLDRRHHAMDAATIALMTPGISTTLSEKNNLRDAQKFTGQSETWKDYCGRTETARKHFAVWKSNMERLTDLFNDKLENDAIPVVQPLRLRLSNSKAHDDGIGKLDSKKLGSVWSLADIDRAATPQIWTALTRCDDFDPTKGLPENANRVIRAQGVKYESEDNIPVFPSNVAAIAVRDGYAEIGSTIHHARIYRIDDGKKTFYSMIRVFAVDLLKHQAEDLFTVKLPPSAISIRTCEDSLRRALSNGTAEYLGWLVPGDEIIVDTSDKAFHTGQIGDLLRNFPVNSFRLTGFPSNSRLRLKPVLLAGEGLRDDAEDSIKKILLGQGWRPAINVLFSKGKPRIVRRNSLGIERPSSNNGLPFSWEA

SEQ ID NO: 129 - protein, 872 aa, Candidatus Parvarchaeum
MLGSSRYLRYNLTSFEGKEPFLIMGYYKEYNKELSSKAQKEFNDQISEFNSYYKLGIDLGDKTGIAIVKGNKIILAKTLIDLHSQKLDKRREARRNRRTRLSRKKRLARLRSWVMRQKVGNQRLPDPYKIMHDNKYWSIYNKSNSANKKNWIDLLIHSNSLSADDFVRGLTIIFRKRGYLAFKYLSRLSDKEFEKYIDNLKPPISKYEYDEDLEELSSRVENGEIEEKKFEGLKNKLDKIDKESKDFQVKQREEVKKELEDLVDLFAKSVDNKIDKARWKRELNNLLDKKVRKIRFDNRFILKCKIKGCNKNTPKKEKVRDFELKMVLNNARSDYQISDEDLNSFRNEVINIFQKKENLKKGELKGVTIEDLRKQLNKTFNKAKIKKGIREQIRSIVFEKISGRSKFCKEHLKEFSEKPAPSDRINYGVNSAREQHDFRVLNFIDKKIFKDKLIDPSKLRYITIESPEPETEKLEKGQISEKSFETLKEKLAKETGGIDIYTGEKLKKDFEIEHIFPRARMGPSIRENEVASNLETNKEKADRTPWEWFGQDEKRWSEFEKRVTSLYSKKKISERKREILLNKSNEYPGLNPTELSRIPSTLSDFVESIRKMFVKYGYEEPQTLVQKGKPIIQVVRGRDTQALRWRWHALDSNIIPEKDRKSSFNHAEDAVIAACMPPYYLRQKIFREEAKIKRKVSNKEKEVTRPDMPTKKIAPNWSEFMKTRNEPVIEVIGKVKPSWKNSIMDQTFYKYLLKPFKDNLIKIPNVKNTYKWIGVNGQTDSLSLPSKVLSISNKKVDSSTVLLVHDKKGGKRNWVPKSIGGLLVYITPKDGPKRIVQVKPATQGLLIYRNEDGRVDAVREFINPVIEMYNNG

SEQ ID NO: 130 - protein, 1229 aa, Pediococcus acidilactici
MGDRKYNLGLDIGTSSIGFAAVDENNQPIRVKGKTAIGVRLFEEGKTAADRRGFRTTRRRLSRRRWRINLLNEIFDAHLAEVDPTFLARLKESNRSNLDPKKSFQGSLLFPERKDYQFYEEYPTIYHLRKALMEKDRKFDIREIYLAVHHIIKYRGNFLNGTPMRSFKVENIELNTLFDQLNQLYAEIVPDNELAFDLAQVADVKDVLSSTTIYKMDKKKQLVKMMLLPASNKALQSENKKIVTQFVNAILNYKFKLDVLLQVETDADWSLKLNDEGADDKLEEFTGDLDENRLEIIDLLQRLHNWFSLNEITKDGNSLSAAMVEKYENHHHHLGLLKKVIENHPDAKKAKALKETYTAYVGKTDDKTQNQDDFYKAVEKNLDDSPDAKGIKRLIQLDQFMPKQRTGQNGAIPHQLHQQELDQIIEKQSKYYPFLAEPNPNVKRRKDAPYKLDELIAFKIPYYVGPLVTPEEQAQNKENVFAWMKRKAAGPITPWNFDEKVDRMESANRFIRRMTTKDTYLFGEDVLPAESMIYQKFVVLNELNNLKINGRHLSLKDKQDVYNDLFKQQKTVSIKALQNYYVTKKKAATAPTVGGLADPKKFLSSLSTYIDFKNMFGERVNDPQFQEDLEQIVEWSTIFEDRGIFKAKLQALGWLSEKQIQQLVAKRYKGWGRLSKKLLTGLKNAEGYSILDEMWRSTENFMQIQSRPEFAALIQQANEKQFEGNDPDNVWENIENILGDAYTSPQNKKAIRQVVKVVQDIEKAVGNPPEKIAIEFTREAAANPQRTQSRLRTLEKLYESAEEVVDAGLTAELAEFKENKHVLSDKYYLYFTQLGRDVYTGDTISLDKLNDYDVDHILPQSFIKDDSLDNRVLTIRAVNNGKSDNVPAKMFGKKMGSFWRHLLDNGMISKRKYNNLITDPDNISKYAQKGFINRQLVETSQVIKLTANILNGIYDKDTEIIEVPAKMNSQMRKMFDLVKVREVNDYHHAFDAYLTIFIGNYLYKCYPKLRPYFVYDNFKKFGNKEDIGHKRFNFLGKIEREKKVVAPETGEILWSNVAPNETIKQIKKVYNYKFMIVSREITTRRAELFNQTVYPKNYRGKLIPIKEDRPTDLYGGYSGNTDAYLAIVALEDKKKGKYFKVVGIPTRAAAKLEKLKQQDSQQYLQALHEVIAPQFTKSTKKGIKKTEFEIVLDKVHYRQLVQDGPVKMMLGSSTYKYNAKQLVLSEKAL

SEQ ID NO: 131 - protein, 1398 aa, Veillonella parvula
METQASNQLISSHLKGYPIKDYFVGLDIGTSSVGWAVTNKAYELLKFRSHKMWGSRLFDEGESAVARRGFRSMRRRLERRKLRLKLLEELFADAMAQVDPTFFMRLRESKYHYEDKTTGHSSKHILFIDKNYNDQDYFKEYPTVYHLRSELMKSGTDDIRKLFLAVHHILKYRGNFLYEGATFDSNASTLDDVIKQALENITFNCFDCNSAISSIGQILMEAGKTKSDKAKAIEHLVDTYIATDTVDTSSKTQKDQVKEDKKRLKAFANLVLGLNASLIDLFGSVEELEEDLKKLQITGDTYDDKRDELAKAWSDEIYIIDDCKSVYDAIILLSIKEPGLTISESKVKAFNKHKDDLAILKSLLKSDRSIYNTMFKVDEKGLHNYVHYIKQGRTEETSCNREDFYKYTKKIVEGLSDSKDKEYILSQIELQILLPLQRIKDNGVIPYQLHLEELKAILAKCGPKFPFLNEVADGFSVAEKLIKMLEFRIPYYVGPLNTHHNVDNGGFAWAVRKASGRVTPWNFDDKIDREKSAAAFIKNLTNKCTYLLGEDVLPKSSLLYSEFMLLNELNNVRIDGKPLEKVVKEHLIEAVFKQDHKKMTKNRIEQFLKDNGYISETHKHEITGLDGEIKNDLASYRDMVRILGDGFDRSMAEEIITDITIFGESKKMLRETLRKKFASCLDDEAIKKLTKLRYRDWGRLSQKLLNGIEGCDKAGDGTPETIIILMRNFSYNLMELLGDKFSFMERIQEINAKLTEGQIVNPHDIIDDLALSPAVKRAVWQALRIVDEVAHIKKALPARIFVEVTRSNKNEKKKKDSRQKRLSDLYAAIKKDDVLLNGLNNEIFGELKSSLAKYDDAALRSKKLYLYYTQMGRCAYTGEIIELSLLNTDNYDIDHIYPRSLTKDDSFDNLVLCKRTANAQKSDAYPISEEIQKTQKPFWTFLKQQGLISERKYERLTRITPLTADDLSGFIARQLVETNQSVKAATTLLRRLYPGVDVVFVKAENVTDFRHDNNFIKVRSLNHHHHAKDAYLNIVVGNVYHERFTRNFRAFFKKNGANRTYNLAKMFNYDVNCTNAKDGKAWDVKTSMDTVKKMMDSNDVRVTKRLLEQTGALADATIYKATVAGKAKDGAYIGMKTKSSVFADVSKYGGMTKIKNAYSIIVQYTGKKGEVIKEIVPLPIYLTNRNTTDQDLINYVASIIPQAKDISIIYGKLCINQLVKVNGFYYYLGGKTNSKFCIDNAIQVIVSNEWIPYLKVLEKFNNMRKDNKDLKANVVSTRALDNKHTIEVRIVEEKNIEFFDYLVSKLKMPIYQKMKGNKAAELSEKGYGLFKKMSLEEQSIHLIELLNLLTNQKTTFEVKPLGITASRSTVGSKISNQDEFKVINESITGLYSNEVTIV

SEQ ID NO: 132 - protein, 1485 aa, Prevotella bivia
MKNILGLDLGTNSIGWAKISIDDNGKYIKDSIKLGSRIIPMSQDVLSNFSKGVTLSQTSERTSFRGARRLRERTLLRRERLHRILHLLGFLPKHYEKAIGWDRNDNKTYGKFINHAEPKLAWCKDNNGKMRFLFMDSFHDMLSEFSEKHPELLANGKKIPLDWTIYYLRKKALYKAITKEELAWILLNFNQKRGYYQLRGEEDRDSEANKKEYLELKVIGVEATGEKKGNDIWYNIHLENGWIYRRSSKNPLNDWLGKVKSFIVTTDLDADGNPKKDKDGNIKRSFRAPSEGDWTLIKKRTESLLENSGQTVGQFIYNHILEEPSAKIRGNFIRTIERKYYKDELKAILEKQKEFHHELSSESLLTECAKELYKRNIAHQEVLLKKGIIHLLLNDILFYQRPLKIKKSLIDNCPYENYKYVDKKSGDIKVKSIKCIAKSNPFFQEFRLWQFVSNLRLYRKSDDKDVTSEHLVTTDDYANLFTYLNNRKDIKQSVLLKEYFKIKKVKTINGAEYPVRWNYIDDDNKTYPCNETRYDILHALSKTELKSEWLTPERTYRLWHLLYSIESKEETKKALNKLNLSDDFTEAFLTIKPFKKEYGSYSEKAIKKLLSLMRMGYLWSEDEAIKQVGAEIEKTIEGELPDYVLQRLEKSQHNYNKISDFSGLPLWLASYIIYGRHSEAKEIIHWDNPESMMAYIKDFRQHSMRNPIVEQCVLETLRTVHDIWKEIGHIDEIHIELGREMKSTSEQRKAITQNVLHNQNTNIRIKLLLQELKNDNNITGVRPYSPMQQEILRIYEEGALQGLTKEDKDYNDILKISQTAQPTSNELTRYKLWLEQKYRSPYTGKAISLSKLFTSAYQIEHVIPQSRYFDDSLSNKVICESEVNTLKKAMLGMEFIKTCGGQKVHCTLLGDVEIYNEEDYKAFVNEHYSNNRTKRNKLLMEDIPQEFINRQLNDSRYISKMVKQLLSAIVRGQEEVEATSKFVIPCTGGITDRLKKDWGLNDIWNNLVSPRFQRMNALTGSEYFGHWENKEGKRVFQTTMPIQLQQGFSKKRIDHRHHAMDALVIACASRNIISYLNNETAQDTERRRDLRQKLCDKGGSVRKPWDSFTQDTQYALKDIIVTFKNYVRIINKATNYYEHYKTDGKKGMISQKGDELWAIRKPMHKETVFGKVNLRRPKRVSLSKAIDSVDIICNRKLKKYIKARLNEGLQKKQILNIFKELNNVWEGIDVNKIDIWEMSNDKEPMVATRKQLDTSFDEKKIRSISDTGIQKILLNYLITKNNNPELAFTPEGIQEMNSNISEYNDHKKHQPIYKVRVTEPLGAKYPIGTMGNNPKKFVEAQAGTNLYFAIYEDKEGKRNYDTIPLNIAAERLNQQLSPVPETNENNTPLKFYLSPNDLVYVPSEEERHSGNNIQLDKNRIYKMVSSTSKRCFFIHHRVAISLVDKKEFSAQNKMERSIDNEQVMIKSVCWKLITDRLGNIIKVIK

SEQ ID NO: 133 - protein, 1218 aa, Prevotella buccalis
MNKRILGLDTGTNSLGWAVVDWDEHAQSYELIKYGDVIFQEGVKIEKGIESSKAAERSGYKAIRKQYFRRRLRKIQVLKVLVKYHLCPYLSDDDLRQWHLQKQYPKSDELMLWQRTSDEEGKNPYYDRHRCLHEKLDLTVEADRYTLGRALYHLTQRRGFLSNRLDTSADNKEDGVVKSGISQLSTEMEEAGCEYLGDYFYKLYHEQGNKVRIRQRYTDRKKHYQHEFDAICEKQELSSELIEDLQRAIFFQLPLKSQRHGVGRCTFERGKPRCADSHPDYEEFRMLCFVNNIQVKGPHDLELRPLTYEEREKIEHLFFRKSKPNFDFEDIAKELAGKKNYAWIHDKEERAYKFNYRMTQGVPGCPTTAQLKSIFGDDWKTGIAETYTLIQKKNGSKSLQEMVDDVWNVLYSFSSVEKLKEFAHHKLQLDEENAEKFAKIKLSHSFAALSLKAIRKFLPFLRKGMYYTHASFFANIPTIVGKEIWNNEQSRKYIMENVGELVFNYQPKHRDVQGTIEMLIKDFLANNFELPAGATDKLYHPSMIETYPHALRNEFGILQLGSPRTNAIRNPMAMRSLHVLRRVVNQLLKESIIDENTEVHVEYARELNDANKRRAIADRQKEQDKQHKKYGDEIRKLYKEETGKDIEPTQTDVLKFQLWEEQNHYCLYTGEQIGITDFIGSNPKFDIEHTIPQSVGGDSTQMNLTLCDNRFNREVKKAKLPTELANHEEILTRIEPWKNKYEQLVKERDKQRTFAGMDKAVKDIRIQKRHKLQMEIDYWRGKYERFTMTEVPEGFSRRQGTGIGLISRYAGLYLKSLFHQADSRNKSNVYVVKGVATAEFRKMWGLQSEYEKKCRDNHSHHCMDAITIACIGKREYDLMAEYYHMEETFRQGRGSKPKFSKPWATFTEDVLNIYKNLLVVHDTPNNMPKHTKKYVQTSKGKVLAQGDTARGSLHLDTYYGAIERDGEIRYVVRRPLSSFTNPKELENIVDETVKRTIKEAIADKNFKQAIAEPIYMNEDKGILIKKVRCFANSVKQPINIRQHRDLSKKEYKQQYHVMNENNYLLAIYEGLVKNKVVREFEIVSYIEAAKYYKRSQDRNIFSSIVPTHSTKYGLPLKTKLLMGQQVLMFEENPDEIQVDNTKDLVKRLYKVVGIEKDGRIKFKHHQEARKEGLTIYSTPYKNNDDYVPIFRQSIKNINILVDGIDFNIDILGKVTLKE

SEQ ID NO: 134 - protein, 1218 aa, Prevotella timonensis
MNKRILGLDTGTNSLGWAVVDWDEHAQSYELIKYGDVIFQEGVKIEKGIESSKAAERSGYKAIRKQYFRRRLRKIQVLKVLVKYHLCPYLSDDDLRQWHLQKQYPKSDELMLWQRTSDEEGKNPYYDRHRCLHEKLDLTVEADRYTLGRALYHLTQRRGFLSNRLDTSADNKEDGVVKSGISQLSTEMEEAGCEYLGDYFYKLYDAQGNKVRIRQRYTDRNKHYQHEFDAICEKQELSSELIEDLQRAIFFQLPLKSQRHGVGRCTFERGKPRCADSHPDYEEFRMLCFVNNIQVKGPHDLELRPLTYEEREKIEPLFFRKSKPNFDFEDIAKALAGKKNYAWIHDKEERAYKFNYRMTQGVPGCPTIAQLKSIFGDDWKTGIAETYTLIQKKNGSKSLQEMVDDVWNVLYSFSSVEKLKEFAHHKLQLDEESAEKFAKIKLSHSFAALSLKAIRKFLPFLRKGMYYTHASFFANIPTIVGKEIWNKEQNRKYIMENVGELVFNYQPKHREVQGTIEMLIKDFLANNFELPAGATDKLYHPSMIETYPNAQRNEFGILQLGSPRTNAIRNPMAMRSLHILRRVVNQLLKESIIDENTEVHVEYARELNDANKRRAIADRQKEQDKQHKKYGDEIRKLYKEETGKDIEPTQTDVLKFQLWEEQNHHCLYTGEQIGITDFIGSNPKFDIEHTIPQSVGGDSTQMNLTLCDNRFNREVKKAKLPTELANHEEILTRIEPWKNKYEQLVKERDKQRTFAGMDKAVKDIRIQKRHKLQMEIDYWRGKYERFTMTEVPEGFSRRQGTGIGLISRYAGLYLKSLFHQADSRNKSNVYVVKGVATAEFRKMWGLQSEYEKKCRDNHSHHCMDAITIACIGKREYDLMAEYYRMEETFKQGRGSKPKFSKPWATFTEDVLNIYKNLLVVHDTPNNMPKHTKKYVQTSIGKVLAQGDTARGSLHLDTYYGAIERDGEIRYVVRRPLSSFTKPEELENIVDETVKRTIKEAIADKNFKQAIAEPIYMNEEKGILIKKVRCFAKSVKQPINIRQHRDLSKKEYKQQYHVMNENNYLLAIYEGLVKNKVVREFEIVSYIEAAKYYKRSQDRNIFSSIVPTHSTKYGLPLKTKLLMGQLVLMFEENPDEIQVDNTKDLVKRLYKVVGIEKDGRIKFKYHQEARKEGLPIFSTPYKNNDDYAPIFRQSINNINILVDGIDFTIDILGKVTLKE

SEQ ID NO: 135 - protein, 1487 aa, Prevotella timonensis
MKNILGLDLGSNSVGWALVKVEENGNPIGSIKMGSRIIPMSQDILGSFEKGDTVSQTAQRTLYRGKRRLIERHVLRRERLCRVLHIMNFLPAHFDRLLGWDKTDNKTYGKFIDDSEPKLAWRQNKNEMGKMEFVFMDSFHEMLSDFAKHQPQLIANGKKVPLDWTIYYLRKKALTQLISKEELAWILLNFNKKRGYYQLRGEEEEEQPTKKEEYKVLKVISVDADEGQKGNGIWYNIHLEDGGIYKKKSDIPLYDWVGKTLQLIVVTTYEKDGKTPKIFDSGKQNPSYRLPKEDDWGLVKKRTESQLQSSGKTVGAFIYDNILSKPDDKIRGNLVRTIERKYYKKELIEILQQQAKYHDELHNQNLLESCAKELYAHNDVHYNEVIKSNMINLLVNDIIFYQRPLKSKKSLIANCKYESYEYVDKETGEIKEMPIKCIAKSNPYYQEFRLWQFIHNLRLSDVVTREDVTAQYLSTPQDYCNLFTYLNDRKEIKQDILLKDFFKIKKVQIDKEKVFPIEWNYIKDATKSYPCNETRYELLSALKRAGMDKQWLDDTPNMQYRLWHLLYSVEEKEESAKALRKLYDDDKFVTSFLKIKPFNKCYGAYSEKAIKRLLTLMRMGKAWNEQAIDAKTLKCIQQIITDNVDSKLKEKIDDSRYVLHHVSDFQGLPTYLASYVIYGRHSEVTDIQCWDSPEDLLKFIRDFKQHSLRNPIVEQVILETLRVVYDIWKAEKHIDEIHVEVAREMKLTAQQRNEANLRNLNNEATNLRIKYLLEELKNDTFIKDVRPLSPIHQEKMRIYEQAVLGNLNKQDKDYDDIIKISKKEHPTNAELIRYKLWLEQRYCSPYTGKAISLSKLFTTAYEIEHIIPQSRYFDNSFNNKVICEAEVNKAKGNMLGYEFIKKQGGQKIYCTQLGKAVTILKEEAYKQFVNEHYAHNKRKRDNLLAENIPESFSSRQLNDTRYITKTIMSLLSNVVRQQSEEEATAKNLLPSSGSVTDRLKNDWGLKDVWNTIVTPRFERLNKLSGTNDFGEMKEENGNRYFQTNVPLEYEKGFKKKRIDHRHHAMDALVIACTTRNMVNYISNANANSPKQREDLRQLLCDKNRIINKPWDTFTQDALKALNDIVVSFKNNVRIINRATNRYQRYDKNGKKIIFSQKGDDMWAIRKSMHKETVFGRVNLIRKEVLPIAKALDNISAICNAQLRAYVNDLVDKHFNKKQLVAHFKSLNYKWNRQDVSKVEVWISSDNKTPMVAVRKPLDTSFDKKKIASITDTGIQTILLNYLESKGGDASVAFAPEGIQEMNSNIELYNNGKAHKPIKNVRLSEPLGAKYQVGERGAKTKKYVEADKGTNLFFAIYEDEEGKRYYYSVPLREAIERQKQKLSPVPEYNEKGVALKFYLSPNDLVYVPTEEERTMGTCHIDKARIYKMVSSTGCSCYFVPSTFAKVIVDKVELQSLNKMEKAITDECIKEVCWKLKVDRLGNIINVIK

SEQ ID NO: 136 - protein, 1138 aa, Bifidobacterium dentium
MLCRCHRRYRIGIDVGLMSVGLAAIEVDETGFPIRILNIQSVIHDGGIDPQLGKKKSISRKAISGVARRTRRMRRRKVVRLRQLDATLESLGFPIVEPDSLDTWEIWLTRAKLASSYIQDDETRKEDVSIALRHIARHRGWRNPYSNVESLFVDVAPSEQYEELRRKAEEKLGTSLSGNPTSAEIVECILKRQVGEVQLRTRSRKGVNGNAVEKEGLLPTKLMQSDNAAEIRRIFKVQRIDDETGRKLLRAVFKACSPKGSVERRVGRDALAPGLPRALKASLAFQEYRIANVLTNLVISEDGTKRKLTIAEKQRVFGFLSSNETDDITWIDVAEKLGLERRQIQGVGCLTADGEERISSTPPRNITALHIHSAKPVIREKLVAWWKAASPTVRETMVELLSNTVDIDRVREDMDYSSAVAFIDSLGDEELTALDSVDLLSGRAAYSRQTLKQLTERMLNTDDDLHEARKAVFGVDDNWKPPVDAISTSVGNPAVDRVLKIVNRYLLACQKRWRNPQSVQIEHVRESFSSVAKAKETERVQGERARYRNDLRRELCEQEGLNKIRESDIRRWESVQRQNGTCLYCGSPITFRTCEMDHIVPRKGVGSTNTRVNLAAACAACNKLKSNTAFSVWARTEGAANRKVSQRDAIERVKTFIFNKSVPPREQRAFKQAVISRLRQAESDPAIDNRSIESVAWMADELHRRIEAYFNQDADVSGNTPATQVWVFQGRVTALARKASGIEGRIHFAGEWKKTRLDRRHHAVDAAVIAMMNHSAAQTLVERDSLRLSQWITRKPETWKNYPFSEGQKKTRFKEWLDCMNALLDLLNDALDSDRVPVTRCQRMSLGNSQAHAATIRKMKRVELFSPMDADLIRRASTPALYCALTRLPEYSPEKGLPENRGREIVLNGRHIRSTETVDFFASGAAQLMVRNGSAEIGDSIHHMRIYRYRKTGAKSQEYVYGMIRVFQIDLLHASSENLFAVQLPSQSVSVRYGDKNVVQAIQEGRAEYLGHIVPNDEILISYEGVRMKDSEKIGAYANDFSGTASELAQRRHWVVVGSDVSKLALRPSYLSEEGLENSGSESERLSKQTRKVIEGKGWVVAVNILAKYHPVVIRRNALGEPRFRTNSGMPVSWRWDR

SEQ ID NO: 137 - protein, 587 aa, Neisseria subflava
MATSRSRIRSQTDAFGVVGSLVAFNQTSRLFVAKKNEGETADKELGALLKGVADNAHALQTGNFRTPAELALNKFEKESGHIRNQRGDYSHTFNRKDLQAELNLLFEKQKEFGNPHVSDGLKEGIETLLMAQRPALSGDAVQKMLGYCTFEPTEPKAAKNTYTAGRFIWLTKLNNLRILEQGSERPLTTTERATLMDEPYRKSKLTYAQARKLLGLEDTAFFKGLRYGKDNAEASTLMEMKAYHAISRALEKEGLKDKKSPLNLSPELQDEIGTAFSLFKTDEDITGRLKDRVQPEILEALLKHISFDKFVQISLKALRRIVPLMEQGKRYDEACAEIYGDHYGKKNAEEKIYLPPIPADEIRNPVVLRALSQARKVINAVVRRYGSPARIHIETAREVGKSFKDRKEIEKRQEENRKDREKAAAKFREYFPNFVGEPKSKDILKLRLYEQQHGKCLYSGKEINLGRLNEKGYIEIDHALPFSRTWDDSFNNKVLVLGSENQNKGNQTPYEYFNGKDNSREWQEFKARVETSRFPRSKKQRILLQKFDEDGIYRIGVKTALSFPKYQIDELGKEIRPCRLKKRPPVR

SEQ ID NO: 138 - protein, 1269 aa, Mycoplasma gallisepticum
MNNSIKSKPEVTIGLDLGVGSVGWAIVDNETNIIHHLGSRLFSQAKTAEDRRSFRGVRRLIRRRKYKLKRFVNLIWKYNSYFGFKNKEDILNNYQEQQKLHNTVLNLKSEALNAKIDPKALSWILHDYLKNRGHFYEDNRDFNVYPTKELAKYFDKYGYYKGIIDSKEDNDNKLEEELTKYKFSNKHWLEEVKKVLSNQTGLPEKFKEEYESLFSYVRNYSEGPGSINSVSPYGIYHLDEKEGKVVQKYNNIWDKTIGKCNIFPDEYRAPKNSPIAMIFNEINELSTIRSYSIYLTGWFINQEFKKAYLNKLLDLLIKTNGEKPIDARQFKKLREETIAESIGKETLKDVENEEKLEKEDHKWKLKGLKLNTNGKIQYNDLSSLAKFVHKLKQHLKLDFLLEDQYATLDKINFLQSLFVYLGKHLRYSNRVDSANLKEFSDSNKLFERILQKQKDGLFKLFEQTDKDDEKILAQTHSLSTKAMLLAITRMTNLDNDEDNQKNNDKGWNFEAIKNFDQKFIDITKKNNNLSLKQNKRYLDDRFINDAILSPGVKRILREATKVFNAILKQFSEEYDVTKVVIELARELSEEKELENTKNYKKLIKKNGDKISEGLKALGISEDEIKDILKSPTKSYKFLLWLQQDHIDPYSLKEIAFDDIFTKTEKFEIDHIIPYSISFDDSSSNKLLVLAESNQAKSNQTPYEFISSGNAGIKWEDYEAYCRKFKDGDSSLLDSTQRSKKFAKMMKTDTSSKYDIGFLARNLNDTRYATIVFRDALEDYANNHLVEDKPMFKVVCINGSVTSFLRKNFDDSSYAKKDRDKNIHHAVDASIISIFSNETKTLFNQLTQFADYKLFKNTDGSWKKIDPKTGVVTEVTDENWKQIRVRNQVSEIAKVIEKYIQDSNIERKARYSRKIENKTNISLFNDTVYSAKKVGYEDQIKRKNLKTLDIHESAKENKNSKVKRQFVYRKLVNVSLLNNDKLADLFAEKEDILMYRANPWVINLAEQIFNEYTENKKIKSQNVFEKYMLDLTKEFPEKFSEFLVKSMLRNKTAIIYDDKKNIVHRIKRLKMLSSELKENKLSNVIIRSKNQSGTKLSYQDTINSLALMIMRSIDPTAKKQYIRVPLNTLNLHLGDHDFDLHNMDAYLKKPKFVKYLKANEIGDEYKPWRVLTSGTLLIHKKDKKLMYISSFQNLNDVIEIKNLIETEYKENDDSDSKKKKKANRFLMTLSTILNDYILLDAKDNFDILGLSKNRIDEILNSKLGLDKIVK

SEQ ID NO: 139 - protein, 1354 aa, Prevotella melaninogenica
MADFAKYQPGMVADGRKIPLDWTLYYLRKKALTQAIRKEELAWILLNFNQKRGYYQLRGEEEEENSTKHEEYYELKVVSVEAAEEGKGGNTWYNVTLENGWIYRRQSKIELNDWVGKVRPFIVTTEYEIDGVTIKKDKNGEVKRSFRAPSENDWGLRKKRTESLLEESGKTVGAFIYNHILSEPADKIRGNFIRTIERKFYKKELEAILREQSKHQKELKDIDTLIACIKELYPNNKPHQDSLIKKDMTYLLITDLIFYQRPLKSKKSLIADCPYEYYEYVIKETGENKRQSIKCIAKSNPYYQEFRLWQFIINLRLFDRNNDKEVTSEYLSSMEDYTRLFTYLNDRKDINQETLLKDFFKQKKVKRGMEKEFPIRWNYIEDKEKKYPCNETRHELLTALGKVGIDHSWLDDKELFYRLWHLLYSVESKEEAEGALRKLVDNDDFVNAFLKIKPFKKEYGAYSEKAIKKLLAVMRMGNLWNEVDICEQTRDRIQNIIKGDIDEKIKDRMGRTFSQLSDFQGLPEWLACYVVYGQHSEATDIQRWTKPENLMAYINGFKQHSLRNPIVEQCILETLRTVHDIWKEAGHIDEIHIELGRGMKSTADQRARMSKSIMQNENTNLRIKSLLMELKNAKEFENVRPYSPMQQEILRIYEEGALQELTKEDAQYNEISKISQMAQPSANELLKYRLWLEQKYCSPYTGKPISLSKLFTSAYQIEHIIPQSRYFDDSFTNKVICEAEVNQLKSNMLGYEFIKKHGGEIVRCTMIGDVKLLDAKEYYNFVTEHYTNNRRKKEKLLMEDIPQEFLNRQMNDSRYISKKVMAILSNIVREEDEQEAKSKFVIACSGGITDRLKQDWGLNDVWNSIVYPRFERLNKLTNTENFGRWENKKGKQVFQTSVPLELQKDFSKKRIDHRHHAMDALVIACASNNIINYLNNESAKSQEKREDLRKKLCDKNRIIRKPWETFTQDAHTALENVVVSFKNYIRVINKATNYYEKYDKNGKKEIAEQKGQDMWAIRKPMHKETVFGQVNLRRKITIKLKDALEKIPAICDKELRDYINILVAKQFNKKQILAHFKSINYRLNMKSVDKVDVWQFSNEKEPMVATRKSVDTSFDTKRIATITDTGIQKILLNYLKAKNNDPNIAFTPEGIAEMNKHITEYNNGKQHQPILKVRVSEPKGAKYQVGETGNKRSKFVEAQKGTNLYFAIYEDKEGNRSYNTIPLNEVIERLKQGLSPVPDANEKSIPLKFHLSPNDLVYVPKTDEENEIKMGQIYKFVDSSGTTANFVPHRVSNLIYNVDKKIAENFCNHEIIQNEYGIGSPQSKNQKSITGEMIKAVCWKLEVDRLGNIHKIIK

SEQ ID NO: 140 - protein, 1130 aa, Streptococcus gallolyticus
MTNGKILGLDIGIASVGVGIIEAKTGKVVHANSRLFSAANAENNAERRGFRGSRRLNRRKKHRVKRVRDLFEKYEIVTDFRNLNLNPYELRVKGLTEQLTNEELFAALRTISKRRGISYLDDAEDDSTGSTDYAKSIDENRRLLKTKTPGQIQLERLEKYGQLRGNFTVYDENGEAHRLINVFSTSDYEKEARKILETQADYNKKITAEFIDDYVEILTQKRKYYHGPGNEKSRTDYGRFRTDGTTLENIFGILIGKCSFYPDEYRASKASYTAQEYNFLNDLNNLKVPTETGKLSTEQKEALVEFAKSTATLGPAKLLKEIAKILDCKVDEIKGYREDDKGKPDLHTFEPYRKLKFNLDSVNIDDLSREVLDKLADILTLNTEREGIEDAIRHNLPNQFTEGQISEIIKVRKSQSTAFNKGWHSFSAKLMNELIPELYATSDEQMTILTRLEKFKVNKKSSKNTKTIDEKEVTDEIYNPVVAKSVRQTIKIINAAVKKYGDFDKIVIEMPRDKNADDEKKFIDKRNKENKKEKDDALKRAAYLYNGTDKLPDEVFHGNKQLETKIRLWYQQGERCLYSGKPIPIQELVHNSNNFEIDHILPLSLSFDDSLANKVLVYAWTNQEKGQKTPYQVIDSMDAAWSFREMKDYVLKQKGLGKKKRDYLLTTENIDKIEVKKKFIERNLVDTRYASRVVLNSLQSALRELGKDTKISVIRGQFTSQLRRKWKIDKSRETYHHHAVDALIIAASSQLKLWEKQDNPMFVDYGNNQVVDKQTGEILSVSDDEYKELVFQPPYQGFVNMISSKGFEDEILFSYQVDSKYNRKVSDATIYSTRKAKIGKDKKEETYVLGKIKDIYSQNGFDTFIKKYNKDKTQFLMYQKDPLTWENVIEVILRDYPTTKKSEDGKNDVKCNPFEEYRRENGLVCKYSKKGKGTPIKSLKYYDKKLGNCIDITPEGSKNEVVLQSLNPWRADVYFNPETLKYELLGLKYSDLSFEKGTGKYHISQEKYDVIKEKEGIGKKSEFKFTLYRNDLILIKDTASGEQEIYRFLSRTMPNVKHYAELKPYDKEKFDNVQELVEALGEADKVGRCIKGLNKSNLSIYKVRTDVLGNKYFVKKEGDKPKLDFKNNKK

SEQ ID NO: 141 - protein, 1371 aa, Streptococcus gallolyticus
MTEKNYSIGLDIGTNSVGWAVITDDYKVPAKKMKVLGNTDKKYIKKNLLGALLFDNGETAEATRLKRTARRRYTRRKNRLRYLQEIFAEEMAKVDESFFYRLDESFLTTDDKDFERHPIFGNKADEIKYHQEFPTIYHLRKHLADSHEKADLRLIYLALAHMIKFRGHFLIEGELNAENTDVQKLFEAFVEVYDRTFDDSNLSEITVDASSILTEKFSKSRRLENLIKHYPTEKKNTLFGNLVALALGLQPNFKTSFKLSEDAKLQFSKDTYEEDLEELIGKIGDEYADLFTSAKNLYDAILLSGILTVADNTTKAPLSASMIKRYNEHQVDLKKLKEFIKNNASDKYDEIFNDKDKNGYAGYIENGVKQDEFYKYLKTTLSKIDGSDYFLDKIEREDFLRKQRTFDNGSIPHQIHLQEMHAILRRQGEHYAFLKENQAKIEKILTFRIPYYVGPLARKNSRFAWAEYHSDEKITPWNFDEIIDKEKSAEKFITRMTLNDLYLPEEKVLPKHSLVYETYTVYNELTKVKYVNEQGKSNFFDANMKQEIFEHVFKENRKVTKDKFLNYLNKEFPEYRIQDLIGLDKENKSFNASLGTYHDLKKILDKSFLDDKTNETIIEDIIQTLTLFEDRDMIRQRLQKYSDIFTPQQLKKLERRHYTGWGRLSYKLINGIRNKENGKSILDYLIDDGYANRNFMQLISDDTLPFKQIIKDAQIIGDIDDVTSVVRELPGSPAIKKGILQSVKIVDELVKVMGHNPDNIVIEMARENQTTNRGRNQSQQRLKKLQDSLKELGSNILNEEKPSYIEGKVENNHLQDDRLFLYYIQNGKDMYTGDELDIDHLSDYDIDHIIPQAFIKDDSIDNRVLTSSAKNRGKSDDVPSLDIVHDRKADWIRLYKSGLISKRKFDNLTKAERGGLTENDKAGFIKRQLVETRQITKHVAQILDSRFNTERDENDKVIRNVKVITLKSNLVSQFRKDFKFYKVREINDYHHAHDAYLNAVVGTALLKKYPKLAPEFVYGEYKKYDIRKFITSSGDKATAKYFFYSNLMNFFKRVIRYSNGKVVVRPVIECSKDTGEIAWNKQTDFEKVRRVLSYPQVNIVKKVETQTGGFSKESILPKGNSDKLIPRKTKKFRWDTPKYGGFDSPNIAYSVFVIADVEKGKAKKLKTVKELVGISIMERSSFEENPVVFLEKKGYQNVQEDNLIKLPKYSLFEFEGGRRRLLASASELQKGNEVVLSRHLVELLYHAHRVNSFNNSEHLKYVSEHKKEFGEVLSCVENFAKSYVDVEKNLGKIRAVADKIDTFSIEDISISFVNLLTLTALGAPADFNFLGEKIPRKRYTSTKECLNATLIHQSITGLYETRIDLSKLGEE

SEQ ID NO: 142 - protein, 1168 aa, Azospirillum sp.
MARPAFRAPRREHVNGWTPDPHRISKPFFILVSWHLLSRVVIDSSSGCFPGTSRDHTDKFAEWECAVQPYRLSFDLGTNSIGWGLLNLDRQGKPREIRALGSRIFSDGRDPQDKASLAVARRLARQMRRRRDRYLTRRTRLMGALVRFGLMPADPAARKRLEVAVDPYLARERATRERLEPFEIGRALFHLNQRRGYKPVRTATKPDEEAGKVKEAVERLEAAIAAAGAPTLGAWFAWRKTRGETLRARLAGKGKEAAYPFYPARRMLEAEFDTLWAEQARHHPDLLTAEAREILRHRIFHQRPLKPPPVGRCTLYPDDGRAPRALPSAQRLRLFQELASLRVIHLDLSERPLTPAERDRIVAFVQGRPPKAGRKPGKVQKSVPFEKLRGLLELPPGTGFSLESDKRPELLGDETGARIAPAFGPGWTALPLEEQDALVELLLTEAEPERAIAALTARWALDEATAAKLAGATLPDFHGRYGRRAVAELLPVLERETRGDPDGRVRPIRLDEAVKLLRGGKDHSDFSREGALLDALPYYGAVLERHVAFGTGNPADPEEKRVGRVANPTVHIALNQLRHLVNAILARHGRPEEIVIELARDLKRSAEDRRREDKRQADNQKRNEERKRLILSLGERPTPRNLLKLRLWEEQGPVENRRCPYSGETISMRMLLSEQVDIDHILPFSVSLDDSAANKVVCLREANRIKRNRSPWEAFGHDSERWAGILARAEALPKNKRWRFAPDALEKLEGEGGLRARHLNDTRHLSRLAVEYLRCVCPKVRVSPGRLTALLRRRWGIDAILAEADGPPPEVPAETLDPSPAEKNRADHRHHALDAVVIGCIDRSMVQRVQLAAASAEREAAAREDNIRRVLEGFKEEPWDGFRAELERRARTIVVSHRPEHGIGGALHKETAYGPVDPPEEGFNLVVRKPIDGLSKDEINSVRDPRLRRALIDRLAIRRRDANDPATALAKAAEDLAAQPASRGIRRVRVLKKESNPIRVEHGGNPSGPRSGGPFHKLLLAGEVHHVDVALRADGRRWVGHWVTLFEAHGGRGADGAAAPPRLGDGERFLMRLHKGDCLKLEHKGRVRVMQVVKLEPSSNSVVVVEPHQVKTDRSKHVKISCDQLRARGARRVTVDPLGRVRVHAPGARVGIGGDAGRTAMEPAEDIS

SEQ ID NO: 143 - protein, 1345 aa, Streptococcus mutans
MKKPYSIGLDIGTNSVGWAVVTDDYKVPAKKMKVLGNTDKSHIKKNLLGALLFDSGNTAADRRLKRTARRRYTRRRNRILYLQEIFAEEMSKVDDSFFHRLEDSFLVTEDKRGERHPIFGNLEEEVKYHENFPTIYHLRQYLADNPEKVDLRLVYLALAHIIKFRGHFLIEGKFDTRNNDVQRLFQEFLAVYDNTFENSSLQEQNVQVEEILTDKISKSAKKDRVLKLFPNEKSNGRFAEFLKLIVGNQADFKKHFELEEKAPLQFSKDTYEEELEVLLAQIGDNYAELFLSAKKLYDSILLSGILTVTDVSTKAPLSASMIQRYNEHQMDLAQLKQFIRQKLSDKYNEVFSDVSKDGYAGYIDGKTNQEAFYKYLKGLLNKIEGSGYFLDKIEREDFLRKQRTFDNGSIPHQIHLQEMRAIIRRQAEFYPFLADNQDRIEKILTFRIPYYVGPLARGKSDFAWLSRKSADKITPWNFDEIVDKESSAEAFINRMTNYDLYLPNQKVLPKHSLLYEKFTVYNELTKVKYKTEQGKTAFFDANMKQEIFDGVFKVYRKVTKDKLMDFLEKEFDEFRIVDLTGLDKENKAFNASYGTYHDLRKILDKDFLDNSKNEKILEDIVLTLTLFEDREMIRKRLENYSDLLTKEQVKKLERRHYTGWGRLSAELIHGIRNKESRKTILDYLIDDGNSNRNFMQLINDDALSFKEEIAKAQVIGETDNLNQVVSDIAGSPAIKKGILQSLKIVDELVKIMGHQPENIVVEMARENQFTNQGRRNSQQRLKGLTDSIKEFGSQILKEHPVKHSQLQNDRLFLYYLQNGRDMYTGEELDIDYLSQYDIDHIIPQAFIKDNSIDNRVLTSSKENRGKSDDVPSKNVVRKMKSYWSKLLSAKLITQRKFDNLTKAERGGLTDDDKAGFIKRQLVETRQITKHVARILDERFHTETDENNKKIRQVKIVTLKSNLVSNFRKEFELYKVREINDYHHAHDAYLNAVIGKALLGVYPQLEPEFVYGDYPHFHGHKENKATAKKFFYSNIMNFFKKDDVRTDKNGEIIWKKDEHISNIKKVLSYPQVNIVKKVEEQTGGFSKESILPKGNSDKLIPRKTKKFYWDTKKYGGFDSPIVAYSILVIADIEKGKSKKLKTVKALVGVTIMEKMTFERDPVAFLERKGYRNVQEENIIKLPKYSLFKLENGRKRLLASARELQKGNEIVLPNHLGTLLYHAKNIHKVDEPKHLDYVDKHKDEFKELLDVVSNFSKKYTLAEGNLEKIKELYAQNNGEDLKELASSFINLLTFTAIGAPATFKFFDKNIDRKRYTSTTEILNATLIHQSITGLYETRIDLSKLGGD

SEQ ID NO: 144 - protein, 1024 aa, Helicobacter mustelae
MIRTLGIDIGIASIGWAVIEGEYTDKGLENKEIVASGVRVFTKAENPKNKESLALPRTLARSARRRNARKKGRIQQVKHYLSKALGLDLECFVQGEKLATLFQTSKDFLSPWELRERALYRVLDKEELARVILHIAKRRGYDDITYGVEDNDSGKIKKAIAENSKRIKEEQCKTIGEMMYKLYFQKSLNVRNKKESYNRCVGRSELREELKTIFQIQQELKSPWVNEELIYKLLGNPDAQSKQEREGLIFYQRPLKGFGDKIGKCSHIKKGENSPYRACKHAPSAEEFVALTKSINFLKNLTNRHGLCFSQEDMCVYLGKILQEAQKNEKGLTYSKLKLLLDLPSDFEFLGLDYSGKNPEKAVFLSLPSTFKLNKITQDRKTQDKIANILGANKDWEAILKELESLQLSKEQIQTIKDAKLNFSKHINLSLEALYHLLPLMREGKRYDEGVEILQERGIFSKPQPKNRQLLPPLSELAKEESYFDIPNPVLRRALSEFRKVVNALLEKYGGFHYFHIELTRDVCKAKSARMQLEKINKKNKSENDAASQLLEVLGLPNTYNNRLKCKLWKQQEEYCLYSGEKITIDHLKDQRALQIDHAFPLSRSLDDSQSNKVLCLTSSNQEKSNKTPYEWLGSDEKKWDMYVGRVYSSNFSPSKKRKLTQKNFKERNEEDFLARNLVDTGYIGRVTKEYIKHSLSFLPLPDGKKEHIRIISGSMTSTMRSFWGVQEKNRDHHLHHAQDAIIIACIEPSMIQKYTTYLKDKETHRLKSHQKAQILREGDHKLSLRWPMSNFKDKIQESIQNIIPSHHVSHKVTGELHQETVRTKEFYYQAFGGEEGVKKALKFGKIREINQGIVDNGAMVRVDIFKSKDKGKFYAVPIYTYDFAIGKLPNKAIVQGKKNGIIKDWLEMDENYEFCFSLFKNDCIKIQTKEMQEAVLAIYKSTNSAKATIELEHLSKYALKNEDEEKMFTDTDKEKNKTMTRESCGIQGLKVFQKVKLSVLGEVLEHKPRNRQNIALKTTPKHV

SEQ ID NO: 145 - protein, 765 aa, Butyrivibrio fibrisolvens
MGITIGLDLGVASVGWAVVNDDYEILESCSNIFPSADASKNSERRGFRQGRRLTRRRKNRIHDFQKLWEDKGFVIPSQGTEDVLAIKIKGLSEKLSVDEVYWVLLNSLKHRGISYLDDADSGDNSSDYAKSISRNEEELKEKLPCEIQWERLQKYGAYRGNISIVEDGEPITLRNVFTTSAYKKEVEQFIDTQAKYNAQYSGDFKADYLEIFNRKREYYEGPGNELSRTDYGKYTTEINADGEYITVDNIFDKLVGKCSVNPDERRAAGASYTAQEFNVLNDLNNLTISSESSFIEDGKLTEDAKRKIIETIKNAKTVNVKKIICDVIGDKKCQISGARIDKNEKEIFHSFEAYNKMRRALEEIGFDISSLSRENLDLIGDILTLNTDRESILNAFNRKGIELADEAKDILVKVRKTNGSLFNKWQSFGLSIMNELIPELYAQPKNQMELLTAMGVFKSRGDRFLECKEIPGDLIVDDIYNPVVSKTVRITVRILNALIKKYGYPDRVVIEMPRDKNSDEEQQRLKKEQRDNENEIKDIKARVKTEYGREITEEDFRQHSKLSLKLKLWNEQQGICPYSGKSIKIDDLLDNPNLFEVDHIIPLSISFDDSRNNKVLVYSSENQDKGNRTPLAYLASVNRQWDIHSFMDYVLKTYAGAQKRKKRDNLLNEQDITKVEVLQGFVNRNINDTRYASKVVLNSLQEYFSSKECSTKVKVIRGSFTHQMRVNLKLKKTVMNHMFIMQLMQCLLLFHRWDMTLIMNLQISI

SEQ ID NO: 146 - protein, 1338 aa, Coprococcus catus
MKQEYFLGLDMGTGSLGWAVTDSTYQVMRKHGKALWGTRLFESASTAEERRMFRTARRRLDRRNWRIQVLQEIFSEEISKVDPGFFLRMKESKYYPEDKRDAEGNCPELPYALFVDDNYTDKNYHKDYPTIYHLRKMLMETTEIPDIRLVYLVLHHMMKHRGHFLLSGDISQIKEFKSTFEQLIQNIQDEELEWHISLDDAAIQFVEHVLKDRNLTRSTKKSRLIKQLNAKSACEKAILNLLSGGTVKLSDIFNNKELDESERPKVSFADSGYDDYIGIVEAELAEQYYIIASAKAVYDWSVLVEILGNSVSISEAKIKVYQKHQADLKTLKKIVRQYMTKEDYKRVFVDTEEKLNNYSAYIGMTKKNGKKVDLKSKQCTQADFYDFLKKNVIKVIDHKEITQEIESEIEKENFLPKQVTKDNGVIPYQVHDYELKKILDNLGTRMPFIKENAEKIQQLFEFRIPYYVGPLNRVDDGKDGKFTWSVRKSDARIYPWNFTEVIDVEASAEKFIRRMTNKCTYLVGEDVLPKDSLVYSKFMVLNELNNLRLNGEKISVELKQRIYEELFCKYRKVTRKKLERYLVIEGIAKKGVEITGIDGDFKASLTAYHDFKERLTDVQLSQRAKEAIVLNVVLFGDDKKLLKQRLSKMYPNLTTGQLKGICSLSYQGWGRLSKTFLEEITVPAPGTGEVWNIMTALWQTNDNLMQLLSRNYGFTNEVEEFNTLKKETDLSYKTVDELYVSPAVKRQIWQTLKVVKEIQKVMGNAPKRVFVEMAREKQEGKRSDSRKKQLVELYRACKNEERDWITELNAQSDQQLRSDKLFLYYIQKGRCMYSGETIQLDELWDNTKYDIDHIYPQSKTMDDSLNNRVLVKKNYNAIKSDTYPLSLDIQKKMMSFWKMLQQQGFITKEKYVRLVRSDELSADELAGFIERQIVETRQSTKAVATILKEALPDTEIVYVKAGNVSNFRQTYELLKVREMNDLHHAKDAYLNIVVGNAYFVKFTKNAAWFIRNNPGRSYNLKRMFEFDIERSGEIAWKAGNKGSIVTVKKVMQKNNILVTRKAYEVKGGLFDQQIMKKGKGQVPIKGNDERLADIEKYGGYNKAAGTYFMLVKSLDKKGKEIRTIEFVPLYLKNQIEINHESAIQYLAQERGLNSPEILLSKIKIDTLFKVDGFKMWLSGRTGNQLIFKGANQLILSHQEAAILKGVVKYVNRKNENKDAKLSERDGMTEEKLLQLYDTFLDKLSNTVYSIRLSAQIKTLTEKRAKFIGLSNEDQCIVLNEILHMFQCQSGSANLKLIGGPGSAGILVMNNNITACKQISVINQSPTGIYEKEIDLIKL

SEQ ID NO: 147 - protein, 1035 aa, Candidatus Puniceispirillum
MRRLGLDLGTNSIGWCLLDLGDDGEPVSIFRTGARIFSDGRDPKSLGSLKATRREARLTRRRRDRFIQRQKNLINALVKYGLMPADEIQRQALAYKDPYPIRKKALDEAIDPYEMGRAIFHINQRRGFKSNRKSADNEAGVVKQSIADLEMKLGEAGARTIGEFLADRQATNDTVRARRLSGTNALYEFYPDRYMLEQEFDTLWAKQAAFNPSLYIEAARERLKEIVFFQRKLKPQEVGRCIFLSDEDRISKALPSFQRFRIYQELSNLAWIDHDGVAHRITASLALRDHLFDELEHKKKLTFKAMRAILRKQGVVDYPVGFNLESDNRDHLIGNLTSCIMRDAKKMIGSAWDRLDEEEQDSFILMLQDDQKGDDEVRSILTQQYGLSDDVAEDCLDVRLPDGHGSLSKKAIDRILPVLRDQGLIYYDAVKEAGLGEANLYDPYAALSDKLDYYGKALAGHVMGASGKFEDSDEKRYGTISNPTVHIALNQVRAVVNELIRLHGKPDEVVIEIGRDLPMGADGKRELERFQKEGRAKNERARDELKKLGHIDSRESRQKFQLWEQLAKEPVDRCCPFTGKMMSISDLFSDKVEIEHLLPFSLTLDDSMANKTVCFRQANRDKGNRAPFDAFGNSPAGYDWQEILGRSQNLPYAKRWRFLPDAMKRFEADGGFLERQLNDTRYISRYTTEYISTIIPKNKIWVVTGRLTSLLRGFWGLNSILRGHNTDDGTPAKKSRDDHRHHAIDAIVVGMTSRGLLQKVSKAARRSEDLDLTRLFEGRIDPWDGFRDEVKKHIDAIIVSHRPRKKSQGALHNDTAYGIVEHAENGASTVVHRVPITSLGKQSDIEKVRDPLIKSALLNETAGLSGKSFENAVQKWCADNSIKSLRIVETVSIIPITDKEGVAYKGYKGDGNAYMDIYQDPTSSKWKGEIVSRFDANQKGFIPSWQSQFPTARLIMRLRINDLLKLQDGEIEEIYRVQRLSGSKILMAPHTEANVDARDRDKNDTFKLTSKSPGKLQSASARKVHISPTGLIREG

SEQ ID NO: 148 - protein, 1270 aa, Mycoplasma gallisepticum
MNNSIKSKPEVTIGLDLGVGSVGWAIVDNETNIIHHLGSRLFSQAKTAEDRRSFRGVRRLIRRRKYKLKRFVNLIWKYNSYFGFKNKEDILNNYQEQQKLHNTVLNLKLEALNAKIDPKALSWILHDYLKNRGHFYEDNRDFNVYPTEELANYFDEFGYYKGIIDSKNDDDDKLEEGLTKYKFSNQHWLEEVKKVLSNQTGLPEKFKEEYESLFSYVRNYSEGPGSINSVSPYGIYHLDEKEGKVVQKYNNIWDKTIGKCSIFPDEYRAPKNSPIAMIFNEINELSTIRSYSIYLTGWFINQEFKKAYLNKLLDLLIKTNSEKPIDARQFKKLREETIAESIGKETLKDVESEEKLEKDDHKWKLKGLKLNTNGKIQYNDLSSLAKFVHKLKQHLKLDFLLEDQYTPLDKINFLQSLYVYLGKHLRYSNRVDSANLKEFSDSSRLFERVLQEQKDGLFKLFEQTDKDDEKILTQTHSLSTKAMLLAITRMTNLDNDEDNQKNNDKGWNFEAIKNFDQKFIDITKTNNNLSLKQDKRYLDDQFINDAILSPGVKRILREATKVFNAILKQFSEEYDVTKVVIELARELSEEKELENTKNYKKLIKKNGDKISEGLKALGIAEDKIEEILKSPTKSYKVLLWLQQDHIDPYSQKEIAFDDILTKTEKTEIDHIIPYSISFDDSSSNKLLVLAESNQAKSNQTPYEFINSGKAEITWEVYEAYCHKFKNGDSSLLDSTQRSKKFAKMMKTDTSSKYDIGFLARNLNDTRYATIVFRDALKDYANNHLVEDKPMFKVVCINGGVTSFLRKNFDPKSWYAKKDRDKNIHHAVDASIISIFSNETKTLFNQLTKFADYKLFKNTDGSWKKIDPKTGVVSEVTDENWKQIRVRNQVSEIAKVIDKYIQDSNIERKARYSRKIENKTNISLFNDTVYSAKKVGYEDQIKRKNLKTLDIHESAEENKNSKVKKQFVYRKLVNVSLLNNDKLADLFAEKEDILMYRANPWVINLAEQIFNEYTENKKIKSQNVFEKYMLDLTKEFPEKFSEAFVKSMIRNKTAIIYNVEKDVVHRIKRLKILSSELKENKWSNVIIRSKNESGTKLSYQDTINSIALMIMRSIDPTAKKQYIRVPLNTLNLHLGDQDFDLHNIDAYLKKPKFVKYLKANEIGDEYKPWRVLTSGTLLIHKKDKKLMYISSFQNLNDLIEIKNLIETEYKENVDSDPKKKKKASQILRSLSVILNDYILLDAKYNFDILGLSKNKIDEILNSKLDLDKIAK

SEQ ID NO: 149 - protein, 1204 aa, Prevotella ruminicola
MERILGIDTGTNSLGWAIVDKDENQYHLVAKGTNIFSEGVKIEKGIESSKAAERTEHRSVRKHYWRRKIRKIRLLTILSDNDLCPRLKHEQLRQWRLKKVYPTDDTFMEWQRTEDKAQVNPYKFRYICLTQKLDLSDITQRFILGRALYHLNQRRGFLSNRKEATKESEGTVKEGISSLSKDMKDSGCEYLGEYFYQLYQQGKKIRNHYTARKEHYLKEFKAICSKQELDDALIEKLEKAIFDQRPLKSQKGQVGTCTFEKGKSRCPSSHPLYEDFRMYSFINNIKVQVDTLYDKGERSLTDEEKQLIIPLFKRKSKRTFPFEDIAKKIAGKNNYCYIKSNEEKAYKFNYQMDTQVSGSPVNAQLEEIFGEDWLSSVCEVYTLANNKSRFQIMNDVWHVLFFYDDEDKLKEFAKDRLQLDDELAEKFSKISIPNDYAALSLKAIRKIMPYLRDYGLIYSEAVFLANLVDVLPQHVWGIKEMREAAIENVIDVMHSYDKNNIDGITLEGCVKTFLKERYQVSDDNLKKLYHPSMLDPYPRQRPNDEGVFQLGSPRISSVKNPMAMHSLFRLRKVVNLMLKKGYITPDTKVHIEFSRDLNDANKRWAIQTWQRENEKERERCRKEIEKYIASPSDTDILKYQLWEEQNHKCLYTGDEIRITDFLGDNPKYDIEHTIPRSAGGDSTKMNLTLCSSRFNRDEKKTKLPAELVNHDEILERISNWKEKYEDIDKQIRKISTKGATSKEDKDSKIRRRHYLILQRDYWRGKYQRFTMTEVPEGFSRRQGTDISVISRYARMYLKSVFKQVYIVKGIATSDFRKMWGIQDEYAKKERVNHVHHCIDAITIACIGKAEYDKLADYRHQYDDYLFQGKTKPTFDKPWPSFVIDIKHIQDELLIAHYAKDNLEKFTKKNLRGKDGRIIRDKFGNKLQMKGDTSRNSLHNDKFYGAINHEGEIKYVYRTNIEALDAKSIGNIVDPTVRSIIESAIAIHGSLKAAINKGIWMNEEKHIPIKKVRVFRNDVKKPIELKDQRDLSDKDYKQHYYVTNDGNYMMLIFSKLNNKGREIRQHVVINSLEATEVIKSHKRSQVGKVVWESYYSKEGFDLIYKLKSGTMILLYENNRDEVWDLDIRNLQKRLYIITKMKYDGRIYMMHHQEAREKKDLEEKSGSFKINEDYRPLIVNSYNQFNALVQDLDFEINDLGEIRRLI

SEQ ID NO: 150 - protein, 1178 aa, Scardovia inopinata
MGKRHNSNMAKKKISYRIGIDVGLNSTGLAAIEVDDDGAPIRILNTMSVIHDGGVDPDAAKVRGTRLAISGIARRTRRMRRRRAKRLDRLEQILEKYGYTDTEPVLEEPYGPWICRAELADGFINDDEQRRMMIGIAIRHIARHRGWRNPYQNVRALLNIDDSDLSEEYKNLKEKVQDQINDGKDLPNFTPSQLVRDYLDNFSGQPAARIRTGKAGPRGNRRDAVGILPQRMRQSDYAYELQRIFDMQKIGRDEAQELLMAVFEAKSPKGSAEKRIGKDPLTGKKRALKASLAFQKYRIVATITNLRIKTGTGSERMLSPTELNDIYTYLLRVQDDNHLPTWEDICEEVLHIGRYQLAGIGKTFEGGERISNMPPVIQTSLAIHGLSEGTLAEKLTKWWDKADDDSRESMIKLLSNTVDIDRVNEVDENFASALDFIDSLDDEELTKLDKIALPRGRAAYSEEALNKLTADMLNTGDDLFSARQRIYHVNNSWRPPQPPIGEPLGNPAVDRVLKITNRYLMNCLNRWGQPRRVTIEHTRSGFTSVKQATEHQKISDKRAEYRRDIVKQLEEAGVESVHEYDIRRWEAVQRQNGQCLYCGRDITFKTCEMDHIVPRKGPGSTNTRTNFAAVCPECNRMKSNIPFASWAETKEAKDRGVSLDKAIKQVRFFNFTKNEYSPQAQRNFKKSMIERLKQKTSDEPLDNRSIESVSWMADELYKRIDWYFNHEQYETSKKAINDDKDNLSGTQVVVYPGSITAEARNAAGLGGNIHFIGGRYKTRLDRRHHAVDACVIAMMEPGIARILTERNQLRQAQRLTARIEDDEVNWKDYPTENTAGYNKYQAWSDRMHALLEYMNNALDYDKIPVVRWERLQLGNRSAHEDTIHPLKKLPLSHEISAIDINHASTPALYEALVSLPDFSEQDGLPADPSRQINVNGERYSGDDLVSFFNSNAAQIAIQGGSAELGTAFHHARIYRCWTVGKNGKKKIFFGMIRVYQHDLLHAKNEDLFTYPLKRSSVSMRYAKKEVVHAILSGNAEYVGYLCVGDELVLDLKGDKSNDEGGSRLSGQVGEFVQKFEEDSKVNSQIVNRWTVDGFPDEAKLRLRPSMFAGEGLKNMKSELVENAAIKNILSKTGWRVSVDVISKKSPVVLRRNAFGEPRWKTNAGLPVSYRWQDTETKE

SEQ ID NO: 151 - protein, 1371 aa, Gordonibacter pamelaeae
MNLRNVESYQVGLDIGTGSVGWAVLDDNGDLCRFKGKPTWGSRVFPTAETAAEARVHRGQRRRYDRRRQRIDLLQRFFADEVAKVDPEFFIRLNQARLHPENRDPAHADYRWPLFNGSNFTEKDYYRQFPTIYHLRAHLLKSDEPADIRLVYLALHNIVKHRGNFLHQDNPSLSARNANVGDAVEALCLALDEWCGAHDVECACDEAALAEALGDASLRPGEKRERAEAALGVEKAHKKLAKAVSSAVVGYAAEFGHVFFAESEGSKFALSNDEKVEAYVCPDEGRDLFDAMRAVHSSYVLMGILSEAQGELLSVCKVGEYERYKRDLETLKSLVRAYGPERYDEFFCGPFYEGTRDYDPGKAQGYTKYNLGASKLSHEDFLKEVQKLLKDIGAQADERYADIERAIEAGAFLRRLKTSDNGTIPYQLHLEEMDAIIERQAAFYPFLAQEKDKLKSLVSFRIPYYVGPLTQKNAARDGKGEARFAWSSRKPGMEDARVYPWNWEDVIDKDQSAEDFIRRMTGTCTYLKGEPVLARCSLDYELFCVLNELAGARWTQDGDKSYRFDAADRLGIVEDLFKKRKRVTYEAAEKWLARTHGPESGKSAGGAYHVSGGQGEDAFESQLSSHYDFCKILGVDELSDADEAMAEDIILWNTVFEDRSILKRKIKLAYGDRLGDAQVRKLCQKRYTGWGRLSGELLRGLRSATDNGPKTIMDILLEGDPNHARRMGAAMNLMEILHDDLLEFQAKIDEHNRERALAVGGMSVDEVTGSPALRRGINQALRVVDEIAGIAGKPPAHIYVEVTRDEGARNKGRRTTSRYRALEAALSSIKAQCADVYAELKERDPRALDDERLTLYFMQCGKCMYSGDALDINKLQTYQVDHILPQSYVKDDSFENKVLVRPDTNQRKGDTLLLDERLIARMRGFWRTLRDAELIGEKKFNNLTRTSVSDEQMKKFVSRQLVETGQMVKQVQQLLQARYPESEVQPVKAGVSHQLRVGCALAKSREINDFHHAHDAYLACQVGRFVQYRHSAVYSEPVKMAAVVKQFIKKQAEDYRRTRELPGSDGFIVSSFMTPGFDVKTGEVFRDAWDAGAEIDRIRRCFDYKDCFISRMPEETHGAFWDATIYSPRAAGKTLSLPLKRGLDPRKYGSYSREQFAYFFVYEAVKPKKKQRVLEFAPVPVRVASALANDPDALEDYARELAEAEGLVFERIRRRKVYKYQQIIVGDSRLYVTGREEVRNARQLAFSQDETKLICRIEQGEECEEGELLDLFRSMQRKYLACAPRLARLMKVAEMEEGFIAATASGKREVLLSLTSIAAAHRNSIDLKPIGRKGSSGQMKITFSKELSTNGILFVDSSVTGMFERRCRLGL

SEQ ID NO: 152 - protein, 1388 aa, Zunongwangia profunda
MKRILGLDLGTNSIGWALVNEAENEKEISKIIKLGVRVNPLTIDEKTNFEKGRPLSTNADRTLKRGARRNLQRYKLRRENLIEILIDNHIITKETPLTEIGKGTTYQTLSLRAKAVRERIDLEDFAKVLLAINKKRGYKSSRKASNDEEGQAIDGMAIAKELYERGITPGQYVLELLENDRKYIPDFYRSDLKQEFNKIWNNQKTFYPEILTDELFKELDGKNKSQTWAICQKPFNIKGIKRITKGREKTIENYHWRVKGLSGKLNLEKLAIILQEINNDINQSSGYLGGISDKSKKLYLNKETVGEFLYKQIAKNPHTSLKNQVFYRHDYLDEFEQIWKTQSNFNANLTDELKQEIRDVIIFYQRKIKSQKSLISFCQFESWEQEYFDKETGKTKTRTVGRRVIPKSSPLFQEFKIWQNLNHLVFTNSETDEKIEIKEVEQEIRKELFEELNLRGDLNPNDLLKILRSQFKIGKLSNWKCNFEKIEGNRTNAALFNIYQKISDFEGYGIDWNKSNAKKIRKELKATFPEIGIDASILEFDAYKKQLTNQSSYELWHLLYSAEEDFKISEQDKLIYGNSSVSLKKKLHLKFGFNPEYAKMLANLSLMSDYGNLSAKAIKKILPYLEDGHLYSEACRLAGYNHSKSLTAEELEKFEPKAKLDLLKKNSLRNPVVEKILNQMVNVVNQVIDTYGKPDGVRIELARELKKSAKERAEMTKGIADGTRRNEEIKKIITQKFGIPNPTKSDLVRYRLWQELESRGYKDIFTDKYISPDKIFSSEIDIEHIIPKALLFDDSFSNKTLSFRNVNLKKANRTALDFITQDYQSNVEAYKERVETWNKDNHISKGKRNKLLMSLKDIPDGFIERDLRNSQYIARKAKRMLYEVFPNEVLATSGSITDKLRSDWDLINVMKELNLPKYKALGLTEYEERLDKGTEELFKHEVIKDWTKRNDHRHHAMDALAVAFTTHNHIQYINNLNARKDITQDNHPIIKNIENLITEVNSKGKRVFKAPMSSFRESAKEQIEAILVSFKNKNKVVTKNINQTKKEGGFNYQNAKTPRGQLHKETIYGKSKQPLEKPVKINNRFCKKQVGLIINFKEQEAVLHHLKKYDNNEKIAFSNKTLKSDPIQVNGSPLREVKIFEEIFTIRKDINPDNFKTQKHLDKIIDKGIKEVMKKRLEEYNGDFKTAFSDLDKNPIWLNQSKGITIKRATISGVTNAEPLHQAKDHLGNIILDDNGKEIPIDYVSTGNNHHVAIYQDESGNLQEEVVSFYEAVIRKNQDQPIIKKRHPKGWKFLFTMKQNEMFVFSSENFNPSEIDLLDEKNAAIISPNLFRVQKIATKNYMFRHHLETEVTNNLDFTYRHFQATEWLRNLCKVRIDHIGRIVQIGEY

SEQ ID NO: 153 - protein, 1082 aa, Methylosinus trichosporium
MRVLGLDAGIASLGWALIEIEESNRGELSQGTIIGAGTWMFDAPEEKTQAGAKLKSEQRRTFRGQRRVVRRRRQRMNEVRRILHSHGLLPSSDRDALKQPGLDPWRIRAEALDRLLGPVELAVALGHIARHRGFKSNSKGAKTNDPADDTSKMKRAVNETREKLARFGSAAKMLVEDESFVLRQTPTKNGASEIVRRFRNREGDYSRSLLRDDLAAEMRALFTAQARFQSAIATADLQTAFTKAAFFQRPLQDSEKLVGPCPFEVDEKRAPKRGYSFELFRFLSRLNHVTLRDGKQERTLTRDELALAAADFGAAAKVSFTALRKKLKLPETTVFVGVKADEESKLDVVARSGKAAEGTARLRSVIVDALGELAWGALLCSPEKLDKIAEVISFRSDIGRISEGLAQAGCNAPLVDALTAAASDGRFDPFTGAGHISSKAARNILSGLRQGMTYDKACCAADYDHTASRERGAFDVGGHGREALKRILQEERISRELVGSPTARKALIESIKQVKAIVERYGVPDRIHVELARDVGKSIEEREEITRGIEKRNRQKDKLRGLFEKEVGRPPQDGARGKEELLRFELWSEQMGRCLYTDDYISPSQLVATDDAVQVDHILPWSRFADDSYANKTLCMAKANQDKKGRTPYEWFKAEKTDTEWDAFIVRVEALADMKGFKKRNYKLRNAEEAAAKFRNRNLNDTRWACRLLAEALKQLYPKGEKDKDGKERRRVFSRPGALTDRLRRAWGLQWMKKSTKGDRIPDDRHHALDAIVIAATTESLLQRATREVQEIEDKGLHYDLVKNVTPPWPGFREQAVEAVEKVFVARAERRRARGKAHDATIRHIAVREGEQRVYERRKVAELKLADLDRVKDAERNARLIEKLRNWIEAGSPKDDPPLSPKGDPIFKVRLVTKSKVNIALDTGNPKRPGTVDRGEMARVDVFRKASKKGKYEYYLVPIYPHDIATMKTPPIRAVQAYKPEDEWPEMDSSYEFCWSLVPMTYLQVISSKGEIFEGYYRGMNRSVGAIQLSAHSNSSDVVQGIGARTLTEFKKFNVDRFGRKHEVERELRTWRGETWRGKAYI

SEQ ID NO: 154 - protein, 1186 aa, Gardnerella vaginalis
MEGNISYAIGIDVGLNSVGLAAIRLDNNGEPIRILKAMSVIHDAGIDPNGAKESDTRKAISGVARRVRRLYRQRRRRLQKLDFLLHSLGFPVVENKDLDFSDSFTPWIFRAKLADEYIADEKQRKQMLSVAIRHIARHRGWRNPYQSIKSMTQETEYSEFYNELLKNIEKFAPGVSCEGSTPAQLVRDYLLSQQGKASRRLRITTDDRRKNHPNSLDPVLPRKLMQSDNMLEILNIFNVQHIDNKYVREQIINAVFYAKSPRGSAENRVGKDAITGKGKRALKASLAFQKYRIISTISNLRIRENSKERCLTIEEKQSVYKLLTTSTDEYSKEKSAEAPLYTWIDVADCLGIERYKLRGVGSQIEDGESVGNRPPMLNSELAILYANAKSLKQSLITWWLAANRTQEDKEAFIEILSNTVDIEAIHDNPEYQDKYGSVIAFIDSMDETEIAALENISLPNGRAAYSLETLDKLNKQMLETDDDLFEARKKLFNLPNNWRPSEAPIAEPTGNPSVDRVLKIVHRFLISAKNRWGNPERINIEHVRSGFQSKKMANSYKKLLDKRTEGKENLKAMMRNSLHLGTSDSISDADIRRYEAVQRQNGQCLYCGSEITYHTCELDHIVPRKGPGSTNTRENLVATCSSCNAQKCNTPFATWCEESTYCKNHDISVDSAINRVRAFIFPPNSYDKRGASQFKKEVIARLKQKVGDEAFDNRSIESVAWMANELHRRIDWYYNSQNYQTNNGISDITNKAQTNVGVYAGSLTAIARRMSGIDGKLEFFDGRRKTRFDRRHHAVDASVIAMMTPGIAQILAIKCNLRETQLLQGNKVVPGGIDWKEYPTANDQGYQQYANWSVRMNALLELLNEEMRADRIAVVNSIRLRYSNSSVHKDDVHALLKLHVGDEIDSETIRRASTPALYCALTRNPDYDVNNGLPENTDRTILLHDKKLNADDSITFFKSKAAQLFVREGSVEIGNSIHHLRIYEYFEKLKSGKVKKSYGMIRVFQDDLHRYIHEDLFSCDLPEQSISMRYADTKVAHAVQTGNANYLGYLVPGDEIIVDFSHVKLSGYIGEFVEFLNKIGANCAAYKHWVVAGTDDKTTLILKPSMISSEGIDKLYSNCERNNFDYASYEKSIDKILVDKGWRVSVNVLDQYKAATIRRNALGEPRWASRSHLPISWSWDTGENRE

SEQ ID NO: 155 - protein, 1434 aa, Bacteroidetes oral
MKNILGLDLGTNSIGWAYVKQAQNDSEKSEIAELGVRVNPLTVDEKTNFEKGKPISTNADRTLKRGARRNLQRYKLRRQELIELLKDYQVISDKTILAEDGKETTFETLRLRVKSAKEQVSLEELARILLMINKKRGYKSSRKAKNEDEGQLIDGMEIARRLYDENLTTGQLSLQLLKEGKKSLPDYYRSDLQHELDKVWNFQKQFHPDILTDEFYTSIQGKGQKATRESFSSKYGIDTAENKGSREEKKLQAYQWRADATHKELTKEELAFVITEINNNINNSSGYLGAISDRSKELIFANETVGEYLWKQIQNDPHTSLKNQVFYRQDYFDEFERIWETQSGFYPQILTESLKNELRDILIFYQRKLKSQKALVSICEFESKEIPLKDKQGNPISKNGIPVTKLVGPKVAPKSSPLFQEFKIWQNLNNVLVRPKGSRKRKVTTNQQSTLLEGQEPVFELNLEQKELLFEELNLKGNLKTDYCLELIGYSAKEWEMNYPTLEGNKTNKALYEAYLKIIDSEGYDAKKLLKVKTDKDDINLDDIKVSASEIKTMISDIFNELGINTKILDFDAELERKQFEAQASYRLWHLLYSYEGDDSKSGNELLYRLLEDKFGFKREHSKTLANVSLLSDYGNLSTKAIRTIYPYIKENKFSTACELAGYRHSKLSISKEENENRTLKDTLDVLKKNSLRQPVVEKILNQMINLINELIEKHSEKDEKGNIVKYFKFDEIHIELARELKKNAEERRELDSKVREGKDRNEKIITILKSEFGLPYPTKNDITRYRLYEELKDNGYKDLYTNTYIPREKLFSKEIDIEHIIPKSRLFNDSFSNKTICYRQDNLNKGERTAYDYIEGLGKTQLDEYLNRVENLYTNKFITKAKYRNLLKKESEIGDGFIERDLRETQYIAKKAKEMLLQITRHVVSTTGSITDRLRDDWELVNVMRELNLPKYKVLGLTEIQERKNGQTVEVITDWTKRNDHRHHAMDALTVAFTKHSHIQYLNFLNARKDEKHKEYSNIMGIQQLETEKTTDKDGKDRRVFKTPIPNFRQVAKEHLESILISHKTKNKVVTRATNKIAGSKKQQETLSPRGQLHKETVYGKYRRYVQKEEKIGSKFDLQTIERVANPLYKRLLTKRLEENGGDPKKAFTGKNALAKSPIYLDETQTQQLPEKVKLVWLETDFSIRKDITPDNFKDEKSIDKVLDEGIKRILKDRLKSFDGDAKRAFTDLEQNPIWLNKEKGIAIKRVTISGVSNAEPLHTKKDHLGNEIFDDTGKPIPVDYVSTGNNHHIAIYRDENGNLQEKAVSFFEAVTRANQGLPTVDKTYNQHLGWQFLFTMKQNEMFVFPNKETGFDPQEIDLLDPKNKKLISPNLFRVQKISTKNYFFRHHLETSVETHNALNGVTYKSQLGLNGITDIIKVRINHLGDIVHIGEY

SEQ ID NO: 156 - protein, 1341 aa, Peptoniphilus sp.
MWGSRLFEEASTAQDRREHRSNRRRLERRKYRLDLLEELFVEEINKIDPEFFIRLRESKFHFEDRSLKNTFILFNDKMEGGYNDKVFFSKYPTIYHLRSALINGNKEDVRAVFLAIHNILKNRGHFLLAGNDINISLSLNDTLTDLFEYLKIHLGIEVEFENKLKDIEKIALDKNLSKSDKQKKIVQLLETDYKKQLADVFKLSLGLTANMENIFGKENEQGLEFINAENKIKKIQFDSSYEENIAEFDQFYGEYFEIIDICKKIYDAISLSQILVDGKGLSESKVLSYEKHKEDLKLLKKVLKNIDKAYDNKGEDRLVYKVLKEDKDKGTNYVNYSKLSNNGTATTKEEFYKFLSKNLDLKKFGKLNKEDIETLDYINSEILLGRFLPLQKEKINGVIPYQLQMKELTQILNNASKYLPFLNKIEDGMTVKDKIISLIKFRIPYYVGPLNEYNRIENGNGFAWIEKKKNEKIFPWNFNDVVDIEKSAEKFINNLTNKCTYIKEETVLPKNSIIYSKFMVLNELNNLQYGNKKLDIELKMKMYTDLFLEKKDNRKVTEKRILEYFRINGINDGKEKLTGLNNEIHADMKSYRDMCEIMGENFNINVAENIINWITVFHGEKKILINKIKNVYGKMFNDEQISKLSKLNYSDWGRLSKKLLTDIKCYIDADGINFPVSILEAMEVSNKNLMELLSNKYEFISCIDDINNKYFGDRDISASELIDELYVSPAVKRGIWQSVRILEEIVSIIGHNPKKIFIEMTRHNEEKVQKSSRRHNLEELYKAIRKDPEYVELIKEFDSTTDTDSFKIKKLYLYFMQLGKCAYSKEKIDFDKLFTDSYDIDHIYPRSKTKDDSIHNNLVLVKAKYNREKTDVYPIDINIQKNMNSFWNFLYTKKFITEEKYKRLIRTSDLTDEELAKFISRQLVETSQSTKATAEVLKQIYGDSDICYVKAENVSDFRYGSSRQKDKNDIQKLFVKCREVNHFHHAKDAYLNIVVGNVYDVKFTKNPVNFIKKNKMGNKSNYSLNHMFCFDVERNGYKAWDSSETIKTVGRMMKSNDVRITKHVHPTRGELYDATIYKAKIAKTGSYMPLKSSKNTPLSDVTKYGGYTKIKIAYYSVYKYKFSDKNLIKTEIRLIPIPIYLSKNDDDIKEYVKNYLNDRVNSKLIDFTKIYDKLYVNSLIKINGYLYYLGGKTNDRVWIDNAVSIVLDDKIEYLIKRISNDIKYGYEINVSDDELMDIYESLAEKANKKIFYNRLSDFEKIFSNMDVKKKFVKLEKNDKCRVLLQLLNVLTDSQTTYKLEMVGLKHSRSNIGMKISNLEEFKVINSSITGLYSNEIDILNI

SEQ ID NO: 157 - protein, 1391 aa, Lactobacillus gasseri
MTKIKNEYIVGLDVGTNSCGWVAMDFQNTILRMHGKTAIGSHLFDAGNSAADRRAFRTTRRRIKRRKWRLKLLEEIFDPYMTEVDPYFFARLKESGLSPLDKRKNVSSIVFPTALEDKKFYCNYPTIYHLRYDLMSEDKKFDLREIYLAIHHIVKYRGNFLYNTPVKDFEASKIDVKDSLEKLNELYERLDSEFTVELDSSNALEIEKIIRDKKVFKINKVKSIHQLLSLKTENKERTKLIKDVSKQIINAILGYKTKFETILLKNISKDEADDWEFKLTDVDADNKFENLIGDLNENEQEILLEIRNLANAITLSNIVEEGKTLSESMIDKYNKHSDDLELLKQVISDHPDRDKAKKLALAYDLYVNNRHGKLLQAKDVLGSKKTLSKEDFYKEVKKNLDDSKASQEILDTIALDSFMPKQRTNENGVIPYQLHQLELDRIIKNQGKYYPFLKEVNPVSSHLKEAPYKLDELIRFRVPYYVGPLISPNESTKNKQTKKNQNFAWMIRKEQGQITPWNFDQKVDRMASANKFIKRMTTKDTYLLGEDVLPANSLLYQKFTVLNELNNIKINGKRISVPLKEELYNNLFKKNSTVTTNKLKSYLKENYNLINVEIKGLADEKKFNSGLTTYNKLRNLKIFDQQLDDLNYDKDFERIIEWSTIFEDKAIYKDKLKTIKWLSDRQIDKLSKIRMQGWGQLSKKLLSQLTDNNGQTIIEQLWDSQNNFMQIVNQSDFKDAIAVANQNLLVNTSVEDILNEAYTSPANKKAIRQVVKVVDDIVKAASGKVPKQIAIEFTRDADDKAKISQTRANKLRKVYKELSNELASETIRNELERVAKDQKLLKDKYYLYFMQLGRDAYTGEPINIDDLGQYDIDHILPQSFIKDDSLENRVLVKKAVNNGKSDNVPVKLYGNRMAADLGMTIRHMWEKWKDQGLITKTKYNNLIIDPDKINKYESSGFIHRQLVETSQIIKLVSTILQSKYPDTEIIVVKARYNHYLRKHLNLYKSREVNDYHHAIDAYLSAICGNLLYQVYPYLRPFFVYGQYKKFSSDPKKEKIIYDKTRKYNFISQIFENKSNDIISLETKKKVFDKKDIIEKLKHAYNYKYMLVSRETETHDQEMFKMTVYPRLSRDTKKSRNLISKKKDMPTEIYGGYTNNSDAYMVIARINKKKGTEYRVFGVPMRELVNLRKAEKNGRYNAYLKQVLEPEIMYSKNGKKNKTISSFEIVKAKVPYKQVILDGDKKFMLASSTYVQNAKQLTLSQNSMQAITDNCENDTEEEKALEEKALIEAYDEILTNIDKYLPLFDINKFREKLHAGREKFINLSLDVKKDTILQVLNGLHDNAVMPKIKSLGLSTPLGFMQFSSGVPLSENAKLIYQSPTGLFEKRVKISDL

SEQ ID NO: 158 - protein, 1426 aa, Sphingobacterium spiritivorum
MKHILGLDLGTNSIGWALIKQDFENKQGEILGMGSRIIPMSQDILGDFGKGNSVSQTAERTKYRSVRRLRERFLLRRERLHRILNVLGFLPEHYASQIDFTKRFGKFKEETEPKLVYSNEGFIFKKSFEEMLSDFKTHQPQLLEDNKKIPYDWTIYYLRKKALSRKIEKEELAWILLNFNQKRGYYQLRGEEEEENPNKLIEFYSLKIVDVLADEPQKGKSDIWYSLILENGWIYRRSSKTPLFDWKEKTRDFIVTIDLNDDGSVKTDKEGNEKRSFRAPGENDWTLVKKKTEQEIDSSRKTVGTYIYETLLKNPKQKIKGKLVRTIERKFYKTELKQILEKQKEFHPELRQDDLYSDCVRELYKNNEAHQLTLSKKDFVHLFMEDIIFYQRPLGSQKSSISNCTLEFRKYKDENGTEHTQYLKAIPKSNPYYQEFRIWQWMYNLNIYKKEDDTNVTKDFLNTKADFESLFEFLNNRKEVDQKALLKHFKLNDKTHRWNYVEDKKYPCNETKTMILSRLDKVENISDDFLTREMEQKIWHIIYSVNDKVEYEKALKSFAGKNNLEDNSFFEAFKKFPPFKSEYGAFSEKAIKKLLPLMRMGKFWNYNNISEQSKSRIQKIITGEYDENIKDKVREKAIHLTTETDFQGLQLWLVQYIVYGRHSEAAMLGKWNSADDLEEFLKEFKQHSLRNPIVEQVITETLRVVKDIWQKYGNGAKDFFREIHIELGREMKLPAEERERLTRQISENENTNFRIKALLAEMMDDNSVENVRPFSPMQQEILKIYEEGVLNSDIEIEDDILKISKTAQPSSSDLKRYKLWLEQKYKSPYTGQIIPLNKLFTPEYEIEHIIPQSRYFDDSFTNKIICESAVNKLKDNYIGLEFIKKLGGSIVECGNGKSVAILKHDAYEDFIKKHYANNRSKRNKLLLEDIPEKMIERQMNDTRYISKYISGVLSNIVRVEDGTDEGVNSKNIVPGNGKITTQLKQDWGLNDVWNDLILPRFERMNHLTNSTDFTAWNENHQKFLPTVPVEFSKGFSKKRIDHRHHALDALVIACATKDHVNLLNNQSAKSDTKRYDLKKKLMKFEKVAYNHPQTGERIEREAPKQFLKPWETFTIDAKNHLETIIVSFKQNLRVINKATNYYEKYVEKEGTKVKERVEQKGTNWAIRKPMHKETVSGKIDLPRIKVPKGKILTATRKSLDTSFNLKTIGSITDTGIQKILKNYLQYKDNNPELAFSPEGIEDMNKNIEKFNNGKAHQSISKVRVFELGSKFPLGQSGNKKEKYVEAAKGTNLFFAIYQDKNGKRSYETIPLNEVIERQKQGLSVVDLKGVDDFYLSPNDLVYVPSEDELENISMIDFNKMSSERIYKVVSFTGNQIFFVRQDIATSVVNKAEFSTLNKMERAIDGTMIKETCVKLQIDRLGNISKI

SEQ ID NO: 159 - protein, 1361 aa, Lactobacillus casei; identical to SEQ ID NO: 75

SEQ ID NO: 160 - protein, 1436 aa, Bacteroides fragilis
MKRILGLDLGTNSIGWALVNEAENKDERSSIVKLGVRVNPLTVDELTNFEKGKSITTNADRTLKRGMRRNLQRYKLRRETLTEVLKEHKLITEDTILSENGNRTTFETYRLRAKAVTEEISLEEFARVLLMINKKRGYKSSRKAKGVEEGTLIDGMDIARELYNNNLTPGELCLQLLDAGKKFLPDFYRSDLQNELDRIWEKQKEYYPEILTDVLKEELRGKKRDAVWAICAKYFVWKENYTEWNKEKGKTEQQEREHKLEGIYSKRKRDEAKRENLQWRVNGLKEKLSLEQLVIVFQEMNTQINNSSGYLGAISDRSKELYFNKQTVGQYQMEMLDKNPNASLRNMVFYRQDYLDEFNMLWEKQAVYHKELTEELKKEIRDIIIFYQRRLKSQKGLIGFCEFESRQIEVDIDGKKKIKTVGNRVISRSSPLFQEFKIWQILNNIEVTVVGKKRKRRKLKENYSALFEELNDAEQLELNGSRRLCQEEKELLAQELFIRDKMTKSEVLKLLFDNPQELDLNFKTIDGNKTGYALFQAYSKMIEMSGHEPVDFKKPVEKVVEYIKAVFDLLNWNTDILGFNSNEELDNQSYYKLWHLLYSFEGDNTPTGNGRLIQKMTELYGFEKEYATILANVSFQDDYGSLSAKAIHKILPHLKEGNRYDVACVYAGYRHSESSLTREEIANKVLKDRLMLLPKNSLHNPVVEKILNQMVNVINVIIDIYGKPDEIRVELARELKKNAKEREELTKSIAQTTKAHEEYKTLLQTEFGLTNVSRTDILRYKLYKELESCGYKTLYSNTYISREKLFSKEFDIEHIIPQARLFDDSFSNKTLEARSVNIEKGNKTAYDFVKEKFGESGADNSLEHYLNNIEDLFKSGKISKTKYNKLKMAEQDIPDGFIERDLRNTQYIAKKALSMLNEISHRVVATSGSVTDKLREDWQLIDVMKELNWEKYKALGLVEYFEDRDGRQIGRIKDWTKRNDHRHHAMDALTVAFTKDVFIQYFNNKNASLDPNANEHAIKNKYFQNGRAIAPMPLREFRAEAKKHLENTLISIKAKNKVITGNINKTRKKGGVNKNMQQTPRGQLHLETIYGSGKQYLTKEEKVNASFDMRKIGTVSKLAYRDALLKRLYENDNDPKKAFAGKNSLDKQPIWLDKEQMRKVPEKVKIVTLEAIYTIRKEISPDLKVDKVIDVGVRKILIDRLNEYGNDAKKAFSNLDENPIWLNKEKGISIKRVTISGISNAQSLHVKKDKDGKPILDENGRNIPVDFVNTGNNHHVAVYYRPVIDKRGQLVVDEAGNPKYELEEVVVSFFEAVTRANLGQPIIDKDYKTTEGWQFLFSMKQNEYFVFPNEKTGFNPKEIDLLDVENYGLISPNLFRVQKFSLKNYVFRHHLETTIKDTSSILRGITWIDFRSSKGLDTIVKVRVNHIGQIVSVGEY

SEQ ID NO: 161 - protein, 1517 aa, Bacteroides sp.
MKKIVGLDLGTNSIGWALINAYINKEHLYGIEACGSRIIPMDAAILGNFDKGNSISQTADRTSYRGIRRLRERHLLRRERLHRILDLLGFLPKHYSDSLNRYGKFLNDIECKLPWVKDETGSYKFIFQESFKEMLANFTEHHPILIANNKKVPYDWTIYYLRKKALTQKISKEELAWILLNFNQKRGYYQLRGEEEETPNKLVEYYSLKVEKVEDSGERKGKDTWYNVHLENGMIYRRTSNIPLDWEGKTKEFIVTTDLEADGSPKKDKEGNIKRSFRAPKDDDWTLIKKKTEADIDKIKMTVGAYIYDTLLQKPDQKIRGKLVRTIERKYYKNELYQILKTQSEFHEELRDKQLYIACLNELYPNNEPRRNSISTRDFCHLFIEDIIFYQRPLKSKKSLIDNCPYEENRYIDKESGEIKHASIKCIAKSHPLYQEFRLWQFIVNLRIYRKETDVDVTQELLPTEADYVTLFEWLNEKKEIDQKAFFKYPPFGFKKTTSNYRWNYVEDKPYPCNETHAQIIARLGKAHIPKAFLSKEKEETLWHILYSIEDKQEIEKALHSFANKNNLSEEFIEQFKNFPPFKKEYGSYSAKAIKKLLPLMRMGKYWSIENIDNGTRIRINKIIDGEYDENIRERVRQKAINLTDITHFRALPLWLACYLVYDRHSEVKDIVKWKTPKDIDLYLKSFKQHSLRNPIVEQVITETLRTVRDIWQQVGHIDEIHIELGREMKNPADKRARMSQQMIKNENTNLRIKALLTEFLNPEFGIENVRPYSPSQQDLLRIYEEGVLNSILELPEDIGIILGKFNQTDTLKRPTRSEILRYKLWLEQKYRSPYTGEMIPLSKLFTPAYEIEHIIPQSRYFDDSLSNKVICESEINKLKDRSLGYEFIKNHHGEKVELAFDKPVEVLSVEAYEKLVHESYSHNRSKMKKLLMEDIPDQFIERQLNDSRYISKVVKSLLSNIVREENEQEAISKNVIPCTGGITDRLKKDWGINDVWNKIVLPRFIRLNELTESTRFTSINTNNTMIPSMPLELQKGFNKKRIDHRHHAMDAIIIACANRNIVNYLNNVSASKNTKITRRDLQTLLCHKDKTDNNGNYKWVIDKPWETFTQDTLTALQKITVSFKQNLRVINKTTNHYQHYENGKKIVSNQSKGDSWAIRKSMHKETVHGEVNLRMIKTVSFNEALKKPQAIVEMDLKKKILAMLELGYDTKRIKNYFEENKDTWQDINPSKIKVYYFTKETKDRYFAVRKPIDTSFDKKKIKESITDTGIQQIMLRHLETKDNDPTLAFSPDGIDEMNRNILILNKGKKHQPIYKVRVYEKAEKFTVGQKGNKRTKFVEAAKGTNLFFAIYETEEIDKDTKKVIRKRSYSTIPLNVVIERQKQGLSSAPEDENGNLPKYILSPNDLVYVPTQEEINKGEVVMPIDRDRIYKMVDSSGITANFIPASTANLIFALPKATAEIYCNGENCIQNEYGIGSPQSKNQKAITGEMVKEICFPIKVDRLGNIIQVGSCILTN

SEQ ID NO: 162 - protein, 1399 aa, Olsenella uli
MNLRNTTDEYNIGLDMGTNSVGWAVTDKAGAIAHFKGKPTLGSRLFDAAQTAAGARIHRSQRRRYVRRRWRLDLLQSLFQDEVSKVDSEFFCRLRQSRLYVGDREKGHADYTWPIFNDSDFNEVDYYKRFPTIYHLRKWLMETDEKADIRLIYLATHNIVKHRGNFLRENNKSLSSRDANPAQAVKSLRLALNDWCSERDYECAWKGEEDDGAIDEAILNVLADGEKGRSDQAKEIAKLTGVDCGDAKQSKQCNEAIAKAIVGLKVEMKNIFGEFPAEKTSYIYLSSDEDVEAVRESCPDDSGELFQALCKLYSAYILQELLSYADPSGQTISANMVAKYKQYGRDLRLLKELTRTYAPQKYDLFFRGETYAGSSDYVVDEARGYTRYNLGTTKANYDDFQKSVKELFKGTDALQDERYQEMMVAFGEQKFLRRLKTSDNGSIYYQLHLEELHTILENQGKHYPFLLSEEDKIESLVSFRIPYYVGPLTRKNAAIGHDGKERFAWSSRKDGMEHAVITPWNWEEIIDRDKSAEDFIMRMTGDCTYLQGEPVLPKCSLLYEEFCALNEFNGAHWTVDGDDERRFDAAQRERIMCDLFRRTRSVTYNKVSDWLERKYNFTGARVRGGQGEHGFESKLGSYIFFCKDVFKTDGLDEADYTMIEQIILWSTLFEDRDILKRKIEEAYGGDRLTSEQIKVICKKRFTGWGRLSKRLLTDIKVNTDTGRKSIMDVLREGNPNNGQRSRTMVFMEVLRDEDLGFQKAIDGLNRDYFREHNNGLMDVNDLPGSPAIRRSINQAVRIVDEIASIARKEPTNIFIEVTREEDDPRKKGKRTKRRYDAIKSALEKFKKDDPSLWKELCEKAPGDMDERLSLYFMQRGKCMYSGRPIKIEELHTGKYEVDHIIPRSYIKDDSFENKVLVYREENQHKTDALLIDSSIRQKMGGYWRMLHDAKLVGDKKFRNLFRNHIDDKAMKGFVARQIVETSQMVKLVQTLFEARYPNTRIVPVKAGISHDLREAAGLVKCREANDFHHAHDAFLACRIGLFIQKRHPSVYDNPIGLARIMRDYARMQAREYKKSHCLAHTQGFIVNSFLSSGFDEETGEIFKDDWDAKAEVEGIRRVLNCRQCFISRMPVEGDTRYGGRYWGETIYSPKGKHKHEIPLKQGLDPNLYGGYSDLLYSYFLIYEASDVSSGERVLRFIGIPTSIAARMANQKRLEEYVSRLALQENLEHVRMVRKIMKKQLIEVDNCRLLVTAADAVTNATELAFSLDEMKIISTCAKCINGADPSAIDKIGNAQDSFFDNLKRRGSDRCALLFSQLKLDKLSQNFYMISSDDKSKILISILDRIRAKSNSVDLSLVGGAKHAAQMKFDFNAKLNNPASSFVLIDQSVTGMFERRTRIGL

SEQ ID NO: 163 - protein, 1398 aa, Veillonella atypica
METQTSNQLITSHLKDYPKQDYFVGLDIGTNSVGWAVTNTSYELLKFHSHKMWGSRLFEEGESAVTRRGFRSMRRRLERRKLRLKLLEELFADAMAQVDSTFFIRLHESKYHYEDKTTGHSSKHILFIDEDYTDQDYFTEYPTIYHLRKDLMENGTDDIRKLFLAVHHILKYRGNFLYEGATFNSNAFTFEDVLKQALVNITFNCFDTNSAISSISNILMESGKTKSDKAKAIERLVDTYTVFDEVNTPDKPQKEQVKEDKKTLKAFANLVLGLSANLIDLFGSVEDIDDDLKKLQIVGDTYDEKRDELAKVWGDEIHIIDDCKSVYDAIILMSIKEPGLTISQSKVKAFDKHKEDLVILKSLLKLDRNVYNEMFKSDKKGLHNYVHYIKQGRTEETSCSREDFYKYTKKIVEGLADSKDKEYILNEIELQTLLPLQRIKDNGVIPYQLHLEELKVILDKCGPKFPFLHTVSDGFSVTEKLIKMLEFRIPYYVGPLNTHHNIDNGGFSWAVRKQAGRVTPWNFEEKIDREKSAAAFIKNLTNKCTYLFGEDVLPKSSLLYSEFMLLNELNNVRIDGKALAQGVKQHLIDSIFKQDHKKMTKNRIELFLKDNNYITKKHKPEITGLDGEIKNDLTSYRDMVRILGNNFDVSMAEDIITDITIFGESKKMLRQTLRNKFGSQLNDETIKKLSKLRYRDWGRLSKKLLKGIDGCDKAGNGAPKTIIELMRNDSYNLMEILGDKFSFMECIEEENAKLAQGQVVNPHDIIDELALSPAVKRAVWQALRIVDEVAHIKKALPSRIFVEVARTNKSEKKKKDSRQKRLSDLYSAIKKDDVLQSGLQDKEFGALKSGLANYDDAALRSKKLYLYYTQMGRCAYTGNIIDLNQLNTDNYDIDHIYPRSLTKDDSFDNLVLCERTANAKKSDIYPIDNRIQTKQKPFWAFLKHQGLISERKYERLTRIAPLTADDLSGFIARQLVETNQSVKATTTLLRRLYPDIDVVFVKAENVSDFRHNNNFIKVRSLNHHHHAKDAYLNIVVGNVYHEKFTRNFRLFFKKNGANRTYNLAKMFNYDVICTNAQDGKAWDVKTSMNTVKKMMASNDVRVTRRLLEQSGALADATIYKASVAAKAKDGAYIGMKTKYSVFADVTKYGGMTKIKNAYSIIVQYTGKKGEEIKEIVPLPIYLINRNATDIELIDYVKSVIPKAKDISIKYRKLCINQLVKVNGFYYYLGGKTNDKIYIDNAIELVVPHDIATYIKLLDKYDLLRKENKTLKASSITTSIYNINTSTVVSLSNKVGIDVFDYFMSKLRTPLYMKMKGNKVDELSSTGRSKFIKMTLEEQSIYLLEVLNLLTNSKTTFDVKPLGITGSRSTIGVKIHNLDEFKIINESITGLYSNEVTIV

SEQ ID NO: 164 - protein, 795 aa, Prevotella disiens
MEKQRILGLDPGTNSLGWAVLDFDNSKQEYNLVRKGEVIFEEGVGKSKRGEFSKAAYRTFYKSTRKHYFRRRLRKIEVLKVLVKYDFCPYLSDDLLKQWHEKKIYPAVKEFMDWQRTSDAEGKNPYYDRHCCLNEKLDLSLKSDRYVLGRALYHLTQRRGFKSNRLIQNNDENEEGKVKKGISELSTEMQEANCNYLGDYFYKLYTEKGNTVQIRKRYTDREKHYKNEFNAICEKQELNETIVKELDKAIFFQRKLKPQRHGVGKCTFEPNNRRCAISHPDFERFRMLCFINNIKIKTPFEENLRPLNNEEKALIEPLFYRKSIKNFDFEEIAKKLAGKNNYCYIKDDSSKQYKFNYRMSQGASTCQTIAKLKSIFGEEWKNGIAETYTNRRKKEGLKKQAEMVDDIWNVLYSVSECDVLKDFAINKLQLDEKTADNFSKTKLAQGFATLSLKAIRKILPFLEQGFGYTEAVFLANIPTVVGKEYWNNEDIRNDIMEEIKTIFYHNTLKTNDSHNTILFCIKDILSNNFDLAPGAIDKLYHPSMINVYKDVIPNEDGILQLGSPKIDAVKNPMAMRSLHIIRKVVNELLREGIINSDTEVRIEYARELNDANKRHAIADWQKKQYGKHQKYRKEIKELFKAETGFEIEPNETDILKFELWEEQNHICLYTGQEIGISEFVGENPKYDIEHTIPRSLGGDSTKMNMTLCENKFNRENKQKKLPSELANHSEILERIDDWKKKIYILQKKYDSIRTHNGMDKENKDKKIVSMQVRISGSSICVYSQNTLLWLQYGYN

SEQ ID NO: 165 - protein, 1428 aa, Burkholderiales bacterium
MGKTHIIGVGLDLGGTYTGTFITSHPSDEAEHRDHSSAFTVVNSEKLSFSSKSRTAVRHRVRSYKGFDLRRRLLLLVAEYQLLQKKQTLAPEERENLRIALSGYLKRKGYARTEAETDTSVLESLDPSVFSSAPSFTNFFNDSEPLNIQWEAIANSPETTKALNKELSGQKEADFKKYIKTSFPEYSAKEILANYVEGRRAILDASKYIANLQSLGHKHRSKYLSDILQDMKRDSRITRLSEAFGSTDNLWRIIGNISNLQERAVRWYFNDAKFEQGQEQLDAVKLKNVLVRALKYLRSDDKEWSASQKQIIQSLEQSGDVLDVLAGLDPDRTIPPYEDQNNRRPPEDQTLYLNPKALSSEYGEKWKSWANKFAGAYPLLTEDLTEILKNTDRKSRIKIRSDVLPDSDYRLAYILQRAFDRSIALDECSIRRTAEDFENGVVIKNEKLEDVLSGHQLEEFLEFANRYYQETAKAKNGLWFPENALLERADLHPPMKNKILNVIVGQALGVSPAEGTDFIEEIWNSKVKGRSTVHSICNAIENERKTYGPYFSEDYKFVKTALKEGKTEKELSKKFAAVIKVLKMVSEVVPFIGKELRLSDEAQSKFDNPYSLAQLYNLIETERNGFSKVSLAAHLENAWRMTMTDGSAQCCRLPADCVRPFDGFIRKAIDRNSWEVAKRIAEEVKKSVDFTNGTVKIPVAIEANSFNFTASLTDLKYIQLKEQKLKKKLEDIQRNEENQEKRWLSKEERIRADSHGICAYTGRPLDDVGEIDHIIPRSLTLKKSESIYNSEVNLIFVSAQGNQEKKNNIYLLSNLAKNYLAAVFGASDLSQITNEIESTVLQLKAAGRLGYFDLLSEKERACARHALFLNSDSEARRAVIDVLGSRRKASVNGTQAWFVRSIFSKVRQALAAWTQETGNELIFDAISVPAADSSEMRKRFAEYRPEFRKPKVQPVASHSIDAMCIYLAACSDPFKTKRMGSQLAIYEPINFDNLFTGSCQVIQNTPRNFSDKTNIANSPIFKETIYAERFLDIIVSRGEIFIGYPSNMPFEEKPNRISIGGKDPFSILSVLGAYLDKAPSSEKEKLTIYRVVKNKAFELFSKVAGSKFTAEEDKAAKILEALHFVTVKQDVAATVSDLIKSKKELSKDSIENLAKQKGCLKKVEYSSKEFKFKGSLIIPAAVEWGKVLWNVFKENTAEELKDENALRKALEAAWPSSFGTRNLHSKAKRVFSLPVVATQSGAVRIRRKTAFGDFVYQSQDTNNLYSSFPVKNGKLDWSSPIIHPALQNRNLTAYGYRFVDHDRSISMSEFREVYNKDDLMRIELAQGTSSRRYLRVEMPGEKFLAWFGENSISLGSSFKFSVSEVFDNKIYTENAEFTKFLPKPREDNKHNGTIFFELVGPRVIFNYIVGGAASSLKEIFSEAGKERS

SEQ ID NO: 166 - protein, 1025 aa, gamma proteobacterium
MGGYMPQLMRYRLALDIGSTSIGWAMIRLSMQNEPIAIIRMGVRIFSDGRNPKDGSSLAVTRRVARQMRRRRDRLLKRKTRLLNALVQKKFFPEDADARKALVVLNPYELRKEGLYRQLSGPEFGRALFHISQRRGFLSNRKTDKKDNDSSVLKKAIVDLRQQLEVENCQTIGEWLFKQQQSGKSVRARLRGKTQKDKAYDFYIDRAMIAHEFDTLWVSQAKYDPLLFNEDARAILRDILLYQRPLKPVKPGRCTLIPDESRAPLALPLTQQARIYQELNHLRITTPALGAQALTVAQRNTIAALLEKSDVTFVKIAKALGLTSTTEFNLQDIKRDRLKGNATAIILARNQYFGRRWHDFNADLQNLIVDKLVNEGSETALIEWLKANTDVDESAAERVSGVTLPEGYGSLSVAALRRLLPALKEDVVVYSEAVKRAGFDSHSALSLIEQTGELYQELPYYGEVLQRHVGFGSGDPNDSPERRFGKIANPTVHIGLNELRKIINALIKRYGNPAEVVVELARDLKLSREKRKEIQEEQKQRQDRNEKRIKDACEILGIDPLVIDRGKRREISQKMQLWDELNPKDAANRRCPYTGDQISIEKLLSAEVEIEHILPFSKTLDDSLNNKTVAMRRANRDKGNRTPYEAFGESLNPDYDYDAILQRASLMPREKRKRFASDGYQQWLRDDKDFLSRALNDTAYLSRIAKEYLTLICPPNSVRAIPGRMTAQLRAMFGLNRLLSEGGIKNREDHRHHAIDAAVIGVTDQGLLQKFSRASARTRELQLSRLVDDMPLPWDTYREHVTRALEHLVVSHKPDHGYQGKMHEDTAWGLRDNGQVTRRVRSEDGGPRQRLLENKNVVKINSTRDFSRHGIDEQGQVNAYKGYVGGSNYCIEIWIDEKGKWNSDVVSTFQAYQIVRELGEKAAWQKLRNPLLSLSAKPLVMRLIIDDVVKMQIAGQNKIMRVVKIAQNGQIFFAEHNEANVDARDKDKNNPFKYISKTAGSLQKAGGIHMAISPIGDARPVRYGR

SEQ ID NO: 167 - protein, 1364 aa, Pediococcus acidilactici
MGDRKYNLGLDIGTSSIGFAAVDENNQPIRVKGKTAIGVRLFEEGKTAADRRGFRTTRRRLSRRRWRINLLNEIFDAHLAEVDPTFLARLKESNRSNLDPKKSFQGSLLFPERKDYQFYEEYPTIYHLRKALMEKDRKFDFREIYLAVHHIIKYRGNFLNGTPMRSFKVENIELDTLFDQLNQLYAEIVPDNELAFDLAQVADVKDVLSSTTIYKMDKKKQLVKMMLLPASNKALQSENKKIVTQFVNAILNYKFKLDVLLQVETDADWSLKLNDEGADDKLEEFTGDLDENRLEIIDLLQRLHNWFSLNEITKDGNSLSAAMVEKYENHHHHLGLLKKVIENHPDAKKAKALKETYTAYVGKTDDKTQNQDDFYKAVEKNLDDSPDAKEIKRLIQLDQFMPKQRTGQNGAIPHQLHQQELDQIIEKQSKYYPFLAEPNPNVKRRKDAPYKLDELIAFKIPYYVGPLVTPEEQAQNGENVFAWMKRKAAGPITPWNFDEKVDRMESANRFIRRMTTKDTYLFGEDVLPAESMIYQKFVVLNELNNLKINGRHLSLKDKQDVYNDLFKQQKTVSIKALQNYYVTKKKAATAPTVGGLADPKKFLSSLSTYIDFKNMFGERVNDPQFQEDLEQIVEWSTIFEDRGIFKAKLQALGWLSEKQIQQLVAKRYKGWGRLSKKLLTGLKNAEGYSILDEMWRSTGNFMQIQSRPEFAALIQQANEKQFEGNDPDNVWENIENILGDAYTSPQNKKAIRQVVKVVQDIEKAVGNPPEKIAIEFTREAAANPQRTQSRLRTLEKLYESAEEVVDAGLTAELAEFKENKHVLSDKYYLYFTQLGRDVYTGDTISLDKLNDYDVDHILPQSFIKDDSLDNRVLTIRAVNNGKSDNVPAKMFGKKMGSFWRYLLDNGMISKRKYNNLITDPDNISKYAQKGFINRQLVETSQVIKLTANILNGIYDKDTEIIEVPAKMNSQMRKMFDLVKVREVNDYHHAFDAYLTIFIGNYLYKCYPKLQPYFVYDNFKKFGNKEDIGHKRFNFLGKIEREKKVVAPETGEILWSNVAPNETIKQIKKVYDYKFMIVSREITTRRAELFNQTVYPKNYHGKLIPIKEDRPTDLYGGYSGNTDAYLAIVALEDKKKGKYFKVVGIPTRVAAKLEKLKQQDSQQYLQALHKVIAPQFTKSTKKGIKKTEFEIVLDKVHYRQLVQDGPVKMMLGSSTYKYNAKQLVLSEKALQVIADDRKFDETQKDDNLIAVYDEILSIVNQSFDLYDINGFRKKLNDNRDQFIDLPAETKYEGRKVVAHGKREMILEILKGLHANAAFGNLKPIGFSTAFGQLQVPNGIILSKNAILIHQSPSGLFERKIKLSDL

SEQ ID NO: 168 - protein, 1364 aa, Peptoniphilus duerdenii
MKNLKEYYIGLDIGTASVGWAVTDESYNIPKFNGKKMWGVRLFDDAKTAEERRTQRGSRRRLNRRKERINLLQDLFATEISKVDPNFFLRLDNSDLYREDKDEKLKSKYTLFNDKDFKDRDYHKKYPTIHHLIMDLIEDEGKKDIRLLYLACHYLLKNRGHFIFEGQKFDTKNSFDKSINDLKIHLRDEYNIDLEFNNEDLIEIITDTTLNKTNKKKELKNIVGDTKFLKAISAIMIGSSQKLVDLFEDGEFEETTVKSVDFSTTAFDDKYSEYEEALGDTISLLNILKSIYDSSILENLLKDADKSKDGNKYISKAFVKKFNKHGKDLKTLKRIIKKYLPSEYANIFRNKSINDNYVAYTKSNITSNKRTKASKFTKQEDFYKFIKKHLDTIKETKLNSSENEDLKLIDEMLTDIEFKTFIPKLKSSDNGVIPYQLKLMELKKILDNQSKYYDFLNESDEYGTVKDKVESIMEFRIPYYVGPLNPDSKYAWIKRENTKITPWNFKDIVDLDSSREEFIDRLIGRCTYLKEEKVLPKASLIYNEFMVLNELNNLKLNEFLITEEMKKAIFEELFKTKKKVTLKAVSNLLKKEFNLTGDILLSGTDGDFKQGLNSYIDFKNIIGDKVDRDDYRIKIEEIIKLIVLYEDDKTYLKKKIKSAYKNDFTDDEIKKIAALNYKDWGRLSKRFLTGIEGVDKTTGEKGSIIYFMREYNLNLMELMSGHYTFTEEVEKLNPVENRELCYEMVDELYLSPSVKRMLWQSLRVVDEIKRIIGKDPKKIFIEMARAKEAKNSRKESRKNKLLEFYKFGKKAFINEIGEERYNYLLNEINSEEESKFRWDNLYLYYTQLGRCMYSLEPIDLADLKSNNIYDQDHIYPKSKIYDDSLENRVLVKKNLNHEKGNQYPIPEKVLNKNAYGFWKILFDKGLIGQKKYTRLTRRTPFEERELAEFIERQIVETRQATKETANLLKNICQDSEIVYSKAENASRFRQEFDIIKCRTVNDLHHMHDAYLNIVVGNVYNTKFTKNPLNFIKDKDNVRSYNLENMFKYDVVRGSYTAWIADDSEGNVKAATIKKVKRELEGKNYRFTRMSYIGTGGLYDQNLMRKGKGQIPQKENTNKSNIEKYGGYNKASSAYFALIESDGKAGRERTLETIPIMVYNQEKYGNTEAVDKYLKDNLELQDPKILKDKIKINSLIKLDGFLYNIKGKTGDSLSIAGSVQLIVNKEEQKLIKKMDKFLVKKKDNKDIKVTSFDNIKEEELIKLYKTLSDKLNNGIYSNKRNNQAKNISEALDKFKEISIEEKIDVLNQIILLFQSYNNGCNLKSIGLSAKTGVVFIPKKLNYKECKLINQSITGLFENEVDLLNL

SEQ ID NO: 169 - protein, 1089 aa, Corynebacterium matruchotii
MNSANVNYRVGIDVGSYSLGMAAIAIDDDGKPTEILSAISLIHDSGVDPDSAKSAATRLATSGIARRTRRLYRRKRKRLAKLDKFISSQGWPLKEFEKYEDPFYPWRVRAELATTAITDQQELGEKLSIALRHIARHRGWRNPYSKVTALYTVTEPSDAFLAMQEECAKQLGRTIPETITVGQLVTGMNLGKTRLRGENSLLAARPRQSDNANEIHTIAKVQGLSNELVRQIIDHVFAAESPKGSAAEQVGKDPLQPTKKRALKASDAFQQYRIAALIGNLRIRGGKGNRRLTTEETRLVFDYLRSLPAKQEPTWQLVAEQLKIDRGNLVGTAIMTDDGERAGAKPPVHDTNRIMENTKIKPLATWWKSADADARAAMVKALSNAEVDDFDSQAGAQVQEFFFGISDEDQEKLDGLHLPIGRAAYSEDTLDRLTKRMIGEGMDLYEARQAEFKISNDWAPPAPEIGERVGNPAVDRVLKATARWLNAAERQWGAPKSVNIEHVRAAFMSESSARELDRDNQQRAKRNVKVVAEMQEKLGIEGRPSRADVWRFQSIQRQNGKCAYCGAEISFKNSEMDHIIPQAGEGSTNTRDNLVAVCRECNSSKSNIAFAVWAENTSRPGVSVQKAIERTHHWVTDSGLRKPEFDKFRKQVCDRLRRKATDEPIDARSLESVAWMANELRSRIAQKFKDGDTKVRVYKGALTAEARRASGISGKLEFVDGKGKSRLDRRHHAVDAAVVAFTSNYVAETLALRSNMKFDQELRRKAPQWREFTGSDHVHQVEWTKWKYRMQALAELLNNALVQDRIVVMHNLRLRLGNGAAHEDTIGKLTRLKVGDAISTTDIDRASSEALWCALTRDPDYDPKTGLPENPNRTIRIHGTHLTASDEITVFPVAAASIPIRDGFAKLGSNYHHVRLFRVPSGKKYKYCLMQVYTVDLLKFRKEDLFTVELKPQTISVRTCEALLRKALANGTAEYLGWLVSDDELLIDTSSFDTPGIVKLREEYGPVNRWRLAGLTSVTRLNLRPLYLSKEGLKPNVNPEIKKIIDNRSWIITVNKLFSSGHVKIIRRDALGRPRLHSAAHLPICWEVK

SEQ ID NO: 170 - protein, 1134 aa, Streptococcus mitis
MNGLVLGLDIGIASEGVGILEKNSGKIIHANSRLFPAATADNNVERRKNRQARRLNRRKKHRGVRFQDLFEDYGLLTDFSKVSINLNPYRLRVDGLNQQLTNEELFIALKNIVKRRGISYLDDASEDGGAVSSDYGKAVEENRKLLAEQTPGQIQLERFEKYGQVRGDFTVVENGEKLRLINVFSTSAYKKEAERILRKQQEFNNQITDEFIEDYLKILTGKRKYYHGPGNEKSRTDYGRFRTDGTTLDNIFGILIGKCTFYPEEYRASKASYTAQEFNLLNDLNNLTVPTETKKLSEEQKKVIVEYAKEAKTLGASTLLKYIAKMIDASVDQIRGYRVDVNNKPEMHTFEVYRKMQSLETISVGELSRNVLDELAHILTLNTEREGMEEAINTKLKDSFSQDQVLELVQFRKNNSSLFSKGWHNFSLKLMMELIPELYETSEEQMTILTRLGKQKSKETSKRTKYIDEKELTEEIYNPVVAKSVRQAIKIINEATKKHGIFDNIVIEMARENNEEDAKKDYIKRQKANQDEKNAAMEKAAFQYNGKKELPDNIFHGHKELATKIRLWHQQGEKCLYTGKTIPISDLIYNQYKYEIDHILPLSLSFDDSLSNKVLALATANQEKGQRTPFQALDSMDDAWSYREFKSYVKDLKSLSNKKKDYLLTEEDISKIEVKQKFIERNLVDTRYSSRVVLNALQDFYKSHQFDTTISVVRGQFTSQLRRKWGLEKSRETYHHHAVDALIIAASSQLRLWKKQNNPLITYKEGQFVDSQTGEIISLTDDEYKELVFKAPYDHFVDTLSSKTFEDSILFSYQVDSKFNRKISDATIYATRKAKLDKEKKEYTYTLGKIKDIYSLGTKTPSKTGFYKFLDLYNKDKSQFLMFQKDRKTWDEVIEKIMEQYRPFKEYDKTGKLVDFNPFEKYRQENEPIRKYSKKGNGPEIKSLKYYDILLGKHKNITPEGSRNTVALLSLNPWRTDVYYNMETKKYEFLGLKYADLPFEEGGAYGISTETYNELREKEGIGKNSEFKFTLYKNDLILIKDTETNCQQIFRFWSRTGKDNPKSFEKHKIELKPYEKARFEKGEELEVLGKVPPSSNQLQKNMQIENLSIYKVKTDVLGNKHFIKKEGDKPKLKF

SEQ ID NO: 171 - protein, 1373 aa, Streptococcus bovis
MTKKNYSIGLDIGTNSVGWAVITDDYKVPAKKMKVLGNTDKKYIKKNLLGALLFDSGETAEATRLKRTARRRYTRRKNRLRYLQEIFAEEMTKVDESFFQRLDESFLRWDDDNKKLGRYPIFGNKADVVKYHQEFPTIYHLRKHLADSSEKADLRLVYLALAHMIKFRGHFLIEGELNAENTDVQKIFADFVGVYDRTFDDSHLSEITVDAASILTEKISKSRRLENLIKYYPTEKKNTLFGNLIALALGLQPNFKMNFKLSEDAKLQFSKDSYEEDLGELLGKIGDDYADLFTSAKNLYDAILLSGILIVDDNSTKAPLSASMIKRYVEHQEDLEKLKEFIKANKSELYHDIFKDKNKNGYAGYIENGVKQDEFYKYLKNTLSKIAGSDYFLDKIEREDFLRKQRTFDNGSIPHQIHLQEMHAILRRQGDYYPFLKENQDRIEKILTFRIPYYVGPLARKDSRFSWAEYHSDEKITPWNFDKVIDKEKSAEKFITRMTLNDLYLPEEKVLPKHSHVYETYAVYNELTKIKYVNEQGKDSFFDSNMKQEIFDHVFKENRKVTKEKLLNYLNKEFPEYRIKDLIGLDKENKSFNASLGTYHDLKKILDKAFLDDKVNEEVIEDIIKTLTLFEDKDMIHERLQKYSDIFTADQLKKLERRHYTGWGRLSYKLINGIRNKENNKTILDYLIDDGSANRNFMQLINDDTLPFKQIIQKSQVVGDVDDIEAVVHDLPGSPAIKKGILQSVKIVDELVKVMGDNPDNIVIEMARENQTTNRGRSQSQQRLKKLQNSLKELGSNILNEEKPSYIEDKVENSHLQNDQLFLYYIQNGKDMYTGDELDIDHLSDYDIDHIIPQAFIKDDSIDNRVLTSSAKNRGKSDDVPSLDIVRARKAEWVRLYKSGLISKRKFDNLTKAERGGLTEADKAGFIKRQLVETRQITKHVAQILDARFNTESDENDKVIRDVKVITLKSNLVSQFRKDFEFYKVREINDYHHAHDAYLNAVVGTALLKKYPKLASEFVYGEYKKYDIRKFITNSSDKATAKYFFYSNLMNFFKRVIRYSNGKVIVRPVVEYSKDTEDIAWDKKSNFRTICKVLSYPQVNIVKKVETQTGGFSKESILPKGDSDKLIPRKTKKAYWDTKKYGGFDSPTVAYSVFVVADVEKGKAKKLKTVKELVGISIMERSFFEENPVEFLENKGYHNIREDKLIKLPKYSLFEFEGGKRRLLASASELQKGNEMVIPGHLVKLLYHAQRINSFNSTKYLDYVSAHKKEFEKVLSCVEDFANLYVDVEKNLSKIRAVADSMDNFSIEEISNSFINLLTLTALGAPADFNFLGEKIPRKRYTSTKECLNATLIHQSITGLYETRIDLSKIGEE

SEQ ID NO: 172 - protein, 1099 aa, Corynebacterium accolens
MSLLYRVGIDVGTYSLGCTAIEVDDNDQPVSILSSVSLIHDSGLDPDQQKRAVTRLASSGVARRTRRLYRRRRRRMVKLENFLTAQGWETLPFERYSDPYLPWHARVALVNGYISDDTQRGQYLSIAFRHIANHRGWRNPYWKVSSLYSPDKPSDAFEQIRKELEASTGRQIPETATVGQLISFAQFGKDRLRGGGKQKDKKKPQEQVNQAVISARLHQIDHAREINEICRVQKIDDTLRKQILDLVFAAESPKGAQKGRVGKDPLQPKLFRALKASDAFQQYRIAALTGNLRIYRNGVTVPLDRDEKLIVFNYLVNLPKKEEPSWLKIAEILNIDRGQLRGTATMTDDGERAGATPPVHDTNRTILDSKVKPLAHWWENASDDERAAMLKSLSNSEVEDFDSPAGAQVQAFFADLDETEQEKLDSLHLPMGRAAYSEDTLMRLTNRMLDENLDLYEARLAEFGIPKDWAPPAPRIGEPVGNPAVDRVLKGVARWLEAAADEWGAPKSVVIEHVRDGFVSKSKAIEIDRANNNRHKRNRELFQKMQENLGIEGKVRSSDLWRYQSVQRQNCQCAYCGSPITYTTCEMDHIVPRAGEGSTNTRDNLVATCHRCNLAKKNIPFAVWAEKSTIPGVSVKEALDRTRHWSEDSGMSKKDFQKFRKNVCERLNRTVVDEPLDARSMESVAWMANELRGRVAQRFQEENTTVNVYRGALTAEARRAAGITDKLRFIDGTGKSRLDRRHHAVDAAVVAFIHNYVAETLAIRSNKKREAQLLQGTSQWKEFTGSDDKHRAVWNAWIPKMQKLAVLLQIALDEDRIVVTSNLRLRLGNGRAHEDTISELKTIRVGDAISVTDIDRASSEALWCALTREPDFDEKDGLPENPNRRIRVHGTWYDAEDEIEVFPVGAGAIKVRGGYAKLSRFHHARVYKIPGKKAPIYCMLRVYNTDLVQHRHEDLFSVELKPQTMSVRQAEPKLRKALAENTAEYLGWLVTDDELIIDTSTFRTGLIEEMQSEFGLVRRWRLDGFDSPSLLTLRPLHMSAEGLPDDCALGSRKIIDTKGWRVSINKVFNAGNTTVVRRDALGRARLTSNAHLPISWKEE

SEQ ID NO: 173 - protein, 1054 aa, Actinobacillus pleuropneumoniae
MKLTPLNYILGLDLGIASVGWAVVEIDEQENPLGLIDVGVRTFDRAEVAKTGESLALARRLARSSRRLVKRRADRIKKVKRLLKSENILLSADEQLPNDVWQLRVKGLDQKLERQEWAAVLLHLLKHRGYLSQRKNESKSENKELGALRSGVAANHQILQSAEYRTPAEIAVKKFHVEEGHIRNQRGAYTHTFSRLDLLAEIELLFTRQTELGNPHTSAKLLENLTALLMWQKPALAGEAILKMLGKCTFEPTEYKAAKNSYSAERFVWLTKLNNLRILEQGAERALTDNERFALLDQPYEKAKFTYAQARTMLALPDEAIFKGVRYQGEDKKAVETKTILMEMKAYHQIRKALENADLKAEWNELKNNSELLDDIGTAFSLHKTDEDICRYLDGKLSESILNALLENLNFDKFIQLSLKALQQILPLMLQGQRYDEAVSAIYGDHYGKKSAEINRLLPTIPADEIRNPVVLRTLTQARKVINAVVRLYGSPARIHIETGREVGKSYQDRKKLEKQQEDNRKHRESAVQKFKEYFPNFVGEPKGKDILKMRLYELQQAKCLYSGKSLELHRLLEKGYVEVDHALPFSRTWDDSFNNKVLVLANENQNKGNLTPYEWLDGKNNSEPWQNFVARVQTSGFSHTKKQRILSHKLDEKGFIERNLNDTRYVVRFLCNFIADNMLLTGKGKRKVFASNGQITALLRGRWGLQKVRDDNDRHHALDAVVVACSTVAMQQKITRFVRYEEGNVFSGERIDRETGEIIPLHFPSPWAFFRENVEIRIFSENPKLELENRLPDYPQYNHEFVQPLFVSRMPTRKMTGQGHMETVKSAKRLDEGLSVLKVPLTQLKLNDLERMVNREREMALYESLKVRLEQFDNDPAKAFAEPFYKKGGALVKAVRVEQTQKSGVLVRDGNGVADNASMVRVDVFTKAGKYFLVPIYTWQVAKGILPNKAVTANVDEIDWLEMDESYQFIFTMYPNDLVKVKLKKEEFFGYYGGLDRATGAIVIKEHDLEKSKGRQGIYRIGVKLALSFEKYQVDELGKNIRPCRPTKRQHVR

SEQ ID NO: 174 - protein, 1369 aa, Lactobacillus iners
MNNNYYLGLDLGTNSVGWAVTDDHYNIIKFHGKHMWGMRLFEEAETAKDRRLHRQARRRRQRLVERINLLEELFDKEISKVDQGFFARKKESDLHFEDKTTKSEYALFNDKSYTDRDYYKQYPTIFHLIMDLIENDKKRDIRLVYLACHYLIKHRGHFIFDGKNFTVDNSFENLLDKLITYLKDNDDITLSFPKDQLINIFKNSNLNSTEKSDQLKPFFGRTNLEKGIIKLLSGGKQDLSNMFRDETLKNSNYKNLKFSDNRFDDERDGYAADLGDRIDLLILLKQIYDASILESMMSQARVSIDGHKYISSAKVCAYEKHKSDLKRLKSLIKKYLPSEYNNIFRKITEKDNYVAYSKSNITNNKREKALKYVKYVDFTKYLTKKLKTIKTQDAEDDQEIFEIKGELEKQSFLPKQRTLDNSIIPYQLHLMELKKILDNQSKYYDFLLAKDDQEGITVKDKIISLLTFRLPYYIGPVNPAVHGKFAWVKRLANGKVTPWNYKEKIDIDASHEEFIKTKLSKCSFLIGCDVLPKNSLLYQKYMVLSELNTIKFNGVNISEKLKDDIYQNLFKNIQKVTKKRLQNYIKEHENIIGDVIVTGIDNAFKQGLVSYLKFKKIIGDKVDDDRYQKVLEKIIRDITLYDECAGKKIKKEYKDSDLFTEDELNKIVKLTFNDWGRLSAELLDQLEGEDTVSGETGKIIEFMQKHNYNLMQLMSKKFTFKSKIDEINKSYYQHDKFNYKSMIDSLYVSPATKRILWQSLKVVHEISKIMKHDPEKIFIEMARSKEDHPKRKLSRKADLKQVYKDSKKQIISIIGKDKYQDLSNELDNKDDRDLRWDNLYLYYTQLGRSMYSLKPIDISELMNKNLYDQDHIFPKSKKYDDSIENRVLVEKELNVKKSDIYPISDANIIPQKIKGQVESFWKMLYDHKLIGDKKYARLIRSKAFTDDELAGFIARQLVETRQATKETADLLKRLCPKSRIVYAKAQNASIFRQKFDIPKSRTINDLHHAQDAYLNIVVGNIFDTKFTQDPRNFIKNTKDSRNYNLEKIYDYNVERNNYVAWIAPDGETNGTIANVKCNLSTKDFRVTRPSFYKKGALFNQNLSRKGSNLAPIKEHSPKSNPLKYGGYSGKNNSFFVVVAGKDNKGKDIVKLIPVNTLIYNKMLHCDYKAKQELLTSYVANNFAINNFRIVKDDIKMYSLVKIDGAYYYLVGGTDERIEVKNAMQLLLSKDSIKAVKILEKESKDQFANIKNYKDIDIKLGRTFNEVVSKYTNSVFGKSMLISDKYRKDIFKSVEKSILEFNHLDTIGKADNLLKFVTLMRPSGSAHSLKMVGLIERIRKSNVISNFNEFKLINQSVTGLFENEEDLLKL

SEQ ID NO: 175 - protein, 1420 aa, Bifidobacterium bifidum
MSRKNYVDDYAISLDIGNASVGWSAFTPNYRLVRAKGHELIGVRLFDPADTAESRRMARTTRRRYSRRRWRLRLLDALFDQALSEIDPSFLARRKYSWVHPDDENNADCWYGSVLFDSNEQDKRFYEKYPTIYHLRKALMEDDSQHDIREIYLAIHHMVKYRGNFLVEGTLESSNAFKEDELLKLLGRITRYEMSEGEQNSDIEQDDENKLVAPANGQLADALCATRGSRSMRVDNALEALSAVNDLSREQRAIVKAIFAGLEGNKLDLAKIFVSKEFSSENKKILGIYFNKSDYEEKCVQIVDSGLLDDEEREFLDRMQGQYNAIALKQLLGRSTSVSDSKCASYDAHRANWNLIKLQLRTKENEKDINENYGILVGWKIDSGQRKSVRGESAYENMRKKANVFFKKMIETSDLSETDKNRLIHDIEEDKLFPIQRDSDNGVIPHQLHQNELKQIIKKQGKYYPFLLDAFEKDGKQINKIEGLLTFRVPYFVGPLVVPEDLQKSDNSENHWMVRKKKGEITPWNFDEMVDKDASGRKFIERLVGTDSYLLGEPTLPKNSLLYQEYEVLNELNNVRLSVRTGNHWNDKRRMRLGREEKTLLCQRLFMKGQTVTKRTAENLLRKEYGRTYELSGLSDESKFTSSLSTYGKMCRIFGEKYVNEHRDLMEKIVELQTVFEDKETLLHQLRQLEGISEADCALLVNTHYTGWGRLSRKLLTTKAGECKISDDFAPRKHSIIEIMRAEDRNLMEIITDKQLGFSDWIEQENLGAENGSSLMEVVDDLRVSPKVKRGIIQSIRLIDDISKAVGKRPSRIFLELADDIQPSGRTISRKSRLQDLYRNANLGKEFKGIADELNACSDKDLQDDRLFLYYTQLGKDMYTGEELDLDRLSSAYDIDHIIPQAVTQNDSIDNRVLVARAENARKTDSFTYMPQIADRMRNFWQILLDNGLISRVKFERLTRQNEFSEREKERFVQRSLVETRQIMKNVATLMRQRYGNSAAVIGLNAELTKEMHRYLGFSHKNRDINDYHHAQDALCVGIAGQFAANRGFFADGEVSDGAQNSYNQYLRDYLRGYREKLSAEDRKQGRAFGFIVGSMRSQDEQKRVNPRTGEVVWSEEDKDYLRKVMNYRKMLVTQKVGDDFGALYDETRYAATDPKGIKGIPFDGAKQDTSLYGGFSSAKPAYAVLIESKGKTRLVNVTMQEYSLLGDRPSDDELRKVLAKKKSEYAKANILLRHVPKMQLIRYGGGLMVIKSAGELNNAQQLWLPYEEYCYFDDLSQGKGSLEKDDLKKLLDSILGSVQCLYPWHRFTEEELADLHVAFDKLPEDEKKNVITGIVSALHADAKTANLSIVGMTGSWRRMNNKSGYTFSDEDEFIFQSPSGLFEKRVTVGELKRKAKKEVNSKYRTNEKRLPTLSGASQP

SEQ ID NO: 176 - protein, 1092 aa, Ilyobacter polytropus
MKYSIGLDIGIASVGWSVINKDKERIEDMGVRIFQKAENPKDGSSLASSRREKRGSRRRNRRKKHRLDRIKNILCESGLVKKNEIEKIYKNAYLKSPWELRAKSLEAKISNKEIAQILLHIAKRRGFKSFRKTDRNADDTGKLLSGIQENKKIMEEKGYLTIGDMVAKDPKFNTHVRNKAGSYLFSFSRKLLEDEVRKIQAKQKELGNTHFTDDVLEKYIEVFNSQRNFDEGPSKPSPYYSEIGQIAKMIGNCTFESSEKRTAKNTWSGERFVFLQKLNNFRIVGLSGKRPLTEEERDIVEKEVYLKKEVRYEKLRKILYLKEEERFGDLNYSKDEKQDKKTEKTKFISLIGNYTIKKLNLSEKLKSEIEEDKSKLDKIIEILTFNKSDKTIESNLKKLELSREDIEILLSEEFSGTLNLSLKAIKKILPYLEKGLSYNEACEKADYDYKNNGIKFKRGELLPVVDKDLIANPVVLRAISQTRKVVNAIIRKYGTPHTIHVEVARDLAKSYDDRQTIIKENKKRELENEKTKKFISEEFGIKNVKGKLLLKYRLYQEQEGRCAYSRKELSLSEVILDESMTDIDHIIPYSRSMDDSYSNKVLVLSGENRKKSNLLPKEYFDRQGRDWDTFVLNVKAMKIHPRKKSNLLKEKFTREDNKDWKSRALNDTRYISRFVANYLENALEYRDDSPKKRVFMIPGQLTAQLRARWRLNKVRENGDLHHALDAAVVAVTDQKAINNISNISRYKELKNCKDVIPSIEYHADEETGEVYFEEVKDTRFPMPWSGFDLELQKRLESENPREEFYNLLSDKRYLGWFNYEEGFIEKLRPVFVSRMPNRGVKGQAHQETIRSSKKISNQIAVSKKPLNSIKLKDLEKMQGRDTDRKLYEALKNRLEEYDDKPEKAFAEPFYKPTNSGKRGPLVRGIKVEEKQNVGVYVNGGQASNGSMVRIDVFRKNGKFYTVPIYVHQTLLKELPNRAINGKPYKDWDLIDGSFEFLYSFYPNDLIEIEFGKSKSIKNDNKLTKTEIPEVNLSEVLGYYRGMDTSTGAATIDTQDGKIQMRIGIKTVKNIKKYQVDVLGNVYKVKREKRQTF

SEQ ID NO: 177 - protein, 994 aa, Streptococcus downei
MENQRGKRQRITHQEPYSIGLDIGTASVGSAVINNDLTVPQKRFKVRDINGNVIKTIKKNMSSVLIFDEANPAKGARTKRTSRRRYTRRNFRLLELKKLFEKEIEKIDPNFFHRIKEDSFFNWNDKEFDKHPLFGNLKEEKKFHNNYPTVFHLRNEIGKNSSKKFDLRLVYLALAHIIKYRGHFLDETFDPDASVSVEKRLNDFIVEYNELFDKDLRSEAKFSEILMSDSSNSVKIESTLSLYPSEKNTIFQVFLKLIVGNQGDFNKFFKDELESSSHSGKLVFSSDEVEDEKEELISIIGEDYLDIINLCQSLYSTVALAKIISTDTGESNTPLSASMVKRYNEHKGDLANLKGIVKHFIPEKYEEVFGEHSKTGYTAYIRNPNKMPEKKFYDYLYHEGEKGKISGILSDSRIYELPAVQKFILKIEQKSFLKKQRTKENGLIPYQLHLKELKIIIENQSEYYPFLHEIEEKLEKLLTFRIPYFVGPLAQTKYINPRFNWLVRKSEDHIKPWNFSEIVDEEKSATKFIEKLISNDQFLFGEKVLPKRSIIYQQFLIFNELTKVSYQIKDGPSRNFDSETKEEIFNSLFKKNKLGCVTVVDLKNYIKNDQCLSEKEDIQIEGIKKKFNSSYSTYADLSEISGLKELLDDDTQLDLVEEIIRILTVFEDKKMRTKQLEKLNLPANVDIEKLCKKHYKGWANVSRQLIDGIADRSRGFKKTILDYLKDDDIPNNDAFSTKVQKSLNRNFAQLITDKSLDFARKLDESYKIDVKKDYPSLVEDIPGSPAIRRAILQSLYTVDEIIGVMGRMPKNIVIEMARTNEVSDSPKTRKERIKKLIKETENDADALNFGISKVSEIFDEVKKDENLFKELEVYLYFLQEGKDMYGTETREGHRQPKEINFYDVKNSTGKYHIDHIIPQSLYSGNPLDNIVLTESTNNKIKDKDVPDEATVYEMKNFWLYLMKKGAISKKKFSFLTKIEQGGLSNEDKFGFINR

SEQ ID NO: 178 - protein, 1052 aa, Aminomonas paucivorans
MIGEHVRGGCLFDDHWTPNWGAFRLPNTVRTFTKAENPKDGSSLAEPRRQARGLRRRLRRKTQRLEDLRRLLAKEGVLSLSDLETLFRETPAKDPYQLRAEGLDRPLSFPEWVRVLYHITKHRGFQSNRRNPVEDGQERSRQEEEGKLLSGVGENERLLREGGYRTAGEMLARDPKFQDHRRNRAGDYSHTLSRSLLLEEARRLFQSQRTLGNPHASSNLEEAFLHLVAFQNPFASGEDIRNKAGHCSLEPDQIRAPRRSASAETFMLLQKTGNLRLIHRRTGEERPLTDKEREQIHLLAWKQEKVTHKTLRRHLEIPEEWLFTGLPYHRSGDKAEEKLFVHLAGIHEIRKALDKGPDPAVWDTLRSRRDLLDSIADTLTFYKNEDEILPRLESLGLSPENARALAPLSFSGTAHLSLSALGKLLPHLEEGKSYTQARADAGYAAPPPDRHPKLPPLEEADWRNPVVFRALTQTRKVVNALVRRYGPPWCIHLETARELSQPAKVRRRIETEQQANEKKKQQAEREFLDIVGTAPGPGDLLKMRLWREQGGFCPYCEEYLNPTRLAEPGYAEMDHILPYSRSLDNGWHNRVLVHGKDNRDKGNRTPFEAFGGDTARWDRLVAWVQASHLSAPKKRNLLREDFGEEAERELKDRNLTDTRFITKTAATLLRDRLTFHPEAPKDPVMTLNGRLTAFLRKQWGLHKNRKNGDLHHALDAAVLAVASRSFVYRLSSHNAAWGELPRGREAENGFSLPYPAFRSEVLARLCPTREEILLRLDQGGVGYDEAFRNGLRPVFVSRAPSRRLRGKAHMETLRSPKWKDHPEGPRTASRIPLKDLNLEKLERMVGKDRDRKLYEALRERLAAFGGNGKKAFVAPFRKPCRSGEGPLVRSLRIFDSGYSGVELRDGGEVYAVADHESMVRVDVYAKKNRFYLVPVYVADVARGIVKNRAIVAHKSEEEWDLVDGSFDFRFSLFPGDLVEIEKKDGAYLGYYKSCHRGDGRLLLDRHDRMPRESDCGTFYVSTRKDVLSMSKYQVDPLGEIRLVGSEKPPFVL

SEQ ID NO: 179 - protein, 1023 aa, Helicobacter cinaedi
MKIYSFDIGVASIGWAFIENEVLQDCGIRIFTKAENPKNGASLALPRREARGVRKRLARRRGRLNTIKQLLCKEFGLQLEDYLSNDGELPKAYTASKANPLKSPYELRTLALSQKLDSKDLVRVILHIAKHRGYGNKHAKDSKDTESGKVKKAIEFNRKTLAEKGYRSVGEYLYREFFQQSRISQNNGATEFINVRNKAGNYEHCVAQDMLKEELESILNAQRQFGFSLKQDFENKLLTKIFEQRPLKSFADKVGNCCFIAGEKRAPKDSPSAIEFIALSRTINTLINLSKESGEIYNRAIILQIVESTLKKGEISYKELREIIRLDERLRFKDPRLDYSREIKEAEKVKFLEFKQLKGFKKALGESFTTLAISQLDEIAEHIALIKDRVKLNEKLESYALTKEQREALSNLSFSAHINLSLQALKQILPFMRGDNGEQCLDYDESVEKAGLKALSKDTLKGQMLPPLNEFEPYLSNPVVARALAEYRKVLNVLLKQYGSPHKIHIEYAREAKLSSTERQKYEKEQKDNYAANQAAHKKCQELGLEPSSTNLLKLKLWQEQGGLCLYSGAKITISYLQDPTALQVDHIYPYSRSFDDSYMNKCLVLTKANQEKGNRTPFEAFGTDSAKWGVITTLAQKLPHKKRRRILNTAFNDKEAGFKLRNLNDTSYIARLVADYTETYLEFLPLVESENTTLSKGQKGSKKHIAIVNGVLTSTMRYYLGFASKDRDNHLHHALDAVIIGFMNDSVIKAFSDFKKTQETSKAAYYAHTLSKQEYKKQRAFIQLPSGENFRVSVLEKVESVFVSKPPRKRVRGALHEATFYSPNDPKLLKNYGGTKGVERALALGKMRKVGAKIVSNGAMVRVDIFRHKSSGKFYGVPVYTMDFALGILPNKAVVVGKDQNGVIKDWLEMDSSYEFIFSLYKDDVILVQKKEMQRPELCYFVSFDTSGASIKVAKHDNNFSTLTENQKLLFSNATKEEVVGKSIGIQNLKVFEKWQVSVLGEVKRTQSYPRENISLASKAKK

SEQ ID NO: 180 - protein, 874 aa, Listeria seeligeri
LANGQSEFSWLTRKADGEIRPWNIEEKVDFGKSAIDFIEKMTNKDTYLPKENVLPKHSMCYQKYMVYNELTKIRYTDDQGKTHYFSGQEKQQIFNDLFKQKRKVKKKDLELFLYNMNHVESPTVEGVEDAFNSSFTTYHDLQKVGVPQEILDDPLNTEMLEEIIKILTVFEDKRMINERLQEFSNVLDEAVLKKLERRHYTGWGRLSAKLLIGIRDKESHLTILDYLMNDDKHNRNLMQLINDSNLSFKSIIEKEQVSTADKDIQSIVADLAGSPAIKKGILQSLKIVDELVGIMGYPPQTIVVEMARENQTTGKGKNNSKPRFTSLEKAIKELGSQILKEHPTDNQGLKNDRLYLYYLQNGKDMYTGQELDIHNLSNYDIDHVVPQSFITDNSIDNRVLASSAANREKGDNVPSLEVVRKRKVYWEKLYQAKLMSKRKFDYLTKAERGGLTEADKARFIHRQLVETRQITKNVANILHQRFNCKKDESGNVIEQVRIVTLKAALVSQFRKQFQLYKVREVNDYHHAHDAYLNCVVANTLLKVYPQLEPEFVYGDYHQFDWFKANKATAKKQFYTNIMLFFAKKDRIIDENGEILWDKKYLDTIKKVLNYRQMNIVKKTEIQKGEFSNATANPKGNSSKLIPRKADWDPIKYGGFDGSNMAYAIVIEHEKRKKKTVIKKELIQINIMERTAFEKDQKEFLEGKGYRNPKVITKIPKYTLYECENGRRRMLGSANEAQKGNQMVLPNHLMTLLYHAKNCEASDGKSLAYIESHREMFAELLDSISEFASRYTLADANLEKINTIFEQNKSGDVKVIAQSFVNLLEFNAMGAPASFKYFETNIERKRYNNLKELLNATIIYQSITGLYEARKRLDD

SEQ ID NO: 181 - protein, 1082 aa, Neisseria lactamica
MAAFKPNPMNYILGLDIGIASVGWAMVEIDKEENPIRLIDLGVRVFERAEVPKTGDSLAMARRLARSVRRLTRRRAHRLLRARRLLKREGVLQDADFDENGLVKSLPNTPWQLRAAALDRKLTCLEWSAVLLHLIKHRGYLSQRKNEGETADKELGALLKGVADNAHALQTGDFRTPAELALNKFEKESGHIRNQRGDYSHTFSRKDLQAELNLLFEKQKEFSNPHVSDSLKEGIETLLMAQRPALSGDAVQKMLGHCTFEPAEPKAAKNTYTAERFIWLTKLNNLRILEQGSERPLTDTERATLMDEPYRKSKLTYAQARKLLGLEDTAFFKGLRYGKDNAEAPTLMEMKAYHAISRALEKEGLKDKKSPLNLSTELQDEIGTAFSLFKTDKDITGRLKDRVQPEILEALLKHISFDKFVQISLKALRRIVPLMEQGKRYDEACAEIYGDHYCKKNAEEKIYLPPIPADEIRNPVVLRALSQARKVINCVVRRYGSPARIHIETAREVGKSFKDRKEIEKRQEENRKDREKAAAKFREYFPNFVGEPKSKDILKLRLYEQQHGKCLYSGKEINLVRLNEKGYVEIDHALPFSRTWDDSFNNKVLVLGSENQNKGNQTPYEYFNGKDNSREWQEFKARVETSRFPRSKKQRILLQKFDEEGFKERNLNDTRYVNRFLCQFVADHILLTGKGKRRVFASNGQITNLLRGFWGLRKVRAENDRHHALDAVVVACSTVAMQQKITRFVRYKEMNAFDGKTIDKETGEVLHQKAHFPQPWEFFAQEVMIRVFGKPDGKPEFEEADTPEKLRTLLAEKLSSRPEAVHEYVTPLFVSRAPNRKMSGQGHMETVKSAKRLDEGISVLRVPLTQLKLKGLEKMVNREREPKLYDALKAQLETHKDNPAKAFAEPFYKYDKAGNRTQQVKAVRIEQVQKTGVWVRNHNGIADNATMVRVDVFEKGGKYYLVPIYSWQVAKGILPDRAVVAFKDEEDWTVMDDSFEFRFVLYANDLIKLTAKKNEFLGYFVSLNRATGAIDIRTHDTDSTKGKNGIFQSVGVKTALSFQKNQIDELGKEIRPCRLKKRPPVR

SEQ ID NO: 182 - protein, 1326 aa, Streptococcus pseudoporcinus
MLGTVLFDSGETAQARRLKRTNRRRYTRRRYRLCQLQNIFATEMVKVDDTFFQRLSESFFYYQDKAFDKHPIFGNSKEERAYHKTYPTIYHLRKDLADRDQKADLRLIYLALSHIIKFRGHFLIEGKLNSENTDVQKLFIALVTVYNLLFEEEPIAGETCDAKALLTAKTSKSKRLESLISEFPGQKKNGLFGNLLALALGLRPNFKSNFGLSEDAKLQITKDTYEEELDNLLAEIGDHYADLFLAAKNLSDAILLSDILTLSDENTRAPLSASMIKRYEEHQEDLALLKKLVKEQMPEKYWEIFSNAKKNGYAGYIEGKVSQEDFYRYIKPILSRLKGGDEFLAKIDRDDFLRKQRTFDNGSIPHQIHLKELHAILRRQEKYYPFLAEQKEKIEQLLCFRIPYYVGPLAKGGNSSFAWLKRRSDEPITPWNFKDVVDEEASAQAFIEGMTNYDTYLPEEKVLPKHSPLYEMFTVYNELTKVKYIAENMTKPLYLSAEQKEAIIDHLFKQTRKVTVKDLKEKYFSQIEGLENVDVTGVEGAFNASLGTYNDLLKIIKDKAFLDDEANAEILEEIVLILTLFQDEKLIEKRLAKYANLFEKSVLKKLRKRHYRGWGRLSRQLIDGMKDKASGKTILDFLKADDFANRNFIQLINDSSLDFEKLIDDAQKKAIKRESLTEAVANLAGSPAIKKGILQSLKVVDEIVKVMGHNPDNIVIEMSRENQTTAQGLKNARQRLKKIKEVHKKTGSRILEDNSERITNLTLQDNRLYLYLLQDGKDMYTGQDLDINNLSQYDIDHIIPQSFIKDNSIDNLVLTTQKANRGKSDNVPSIEVVRDMKDRVWRRQLANGAISRQKFDHLTKAERGGLADSDKARFLRRQLVETRQITKHVAQLLDSRFNSKSNQNKKLARNVKIITLKSKIVSDFRKDFGLYKLREVNNYHHAHDAYLNAVVGTALLKKYPKLEAEFVYGDYKHFDLVKLISKSDPSLGKATAKVFFYSNIMNFFKEELSLADGTLMKRPVIETNTETGEVVWDKVKDFKTIRKVLSYPQVNIVKKTEIQSGAFSKESVLSKGNSDKLIERKKGWDPKKYGGFDSPNTAYSIFVVAKVAKRKAQKLKTVKEIVGITIMEQAEYEKDNIAFLEKKGYQDIQEKLLIKLPKYSLFELENGRRRLLASANEFQKGNELALSGKYMKFLYLASRYDKLSSKIESEQQKKLFVEQHLHYFDEILDIVVKHATCYIKAENNLKKIISLYKKKEAYSINEQALNMLNLFIFTSLGAPSTFVFFDETIDRKRYTTSSDVLNGILIQQSITGLYETRIDLSRFGGD

SEQ ID NO: 183 - protein, 1150 aa, Enterococcus faecalis
MYSIGLDLGISSVGWSVIDERTGNVIDLGVRLFSAKNSEKNLERRTNRGGRRLIRRKTNRLKDAKKILAAVGFYEDKSLKNSCPYQLRVKGLTEPLSRGEIYKVTLHILKKRGISYLDEVDTEAAKESQDYKEQVRKNAQLLTKYTPGQIQLQRLKENNRVKTGINAQGNYQLNVFKVSAYANELATILKTQQAFYPNELTDDWIALFVQPGIAEEAGLIYRKRPYYHGPGNEANNSPYGRWSDFQKTGEPATNIFDKLIGKDFQGELRASGLSLSAQQYNLLNDLTNLKIDGEVPLSSEQKEYILTELMTKEFTRFGVNDVVKLLGVKKERLSGWRLDKKGKPEIHTLKGYRNWRKIFAEAGIDLATLPTETIDCLAKVLTLNTEREGIENTLAFELPELSESVKLLVLDRYKELSQSISTQSWHRFSLKTLHLLIPELMNATSEQNTLLEQFQLKSDVRKRYSEYKKLPTKDVLAEIYNPTVNKTVSQAFKVIDALLVKYGKEQIRYITIEMPRDDNEEDEKKRIKELHAKNSQRKNDSQSYFMQKSGWSQEKFQTTIQKNRRFLAKLLYYYEQDGICAYTGLPISPELLVSDSTEIDHIIPISISLDDSINNKVLVLSKANQVKGQQTPYDAWMDGSFKKINGKFSNWDDYQKWVESRHFSHKKENNLLETRNIFDSEQVEKFLARNLNDTRYASRLVLNTLQSFFTNQETKVRVVNGSFTHTLRKKWGADLDKTRETHHHHAVDATLCAVTSFVKVSRYHYAVKEETGEKVMREIDFETGEIVNEMSYWEFKKSKKYERKTYQVKWPNFREQLKPVNLHPRIKFSHQVDRKANRKLSDATIYSVREKTEVKTLKSGKQKITTDEYTIGKIKDIYTLDGWEAFKKKQDKLLMKDLDEKTYERLLSIAETTPDFQEVEEKNGKVKRVKRSPFAVYCEENDIPAIQKYAKKNNGPLIRSLKYYDGKLNKHINITKDSQGRPVEKTKNGRKVTLQSLKPYRYDIYQDLETKAYYTVQLYYSDLRFVEGKYGITEKEYMKKVAEQTKGQVVRFCFSLQKNDGLEIEWKDSQRYDVRFYNFQSANSINFKGLEQEMMPAENQFKQKPYNNGAINLNIAKYGKEGKKLRKFNTDILGKKHYLFYEKEPKNIIK

SEQ ID NO: 184 - protein, 1150 aa, Enterococcus faecalis
MYSIGLDLGVSSVGWSVIDERTGNVIDLGVRLFSAKNSEKNLERRTNRGGRRLIRRKTNRLKDAKKILAAVGFYEDKSLKNSCPYQLRVKGLTEPLSKGEIYKVTLHILKKRGISYLDEDDTEAAKESQDYKEQVRENAQLLTKYTPGQIQLQRLKENNRVKTGINAQGNYQLNVFKVSAYANELATILKTQQAFYPNELTDDWIALFVQPGIAEEAGLIYRKRPYYHGPGNEANNSPYGRWSDFKKTGQPATNIFDKLIGKDFQGELRASGLSLSAQQYNLLNDLTNLKIDGEIPLSPEQKEYILAELMTKEFTRFGINDVAKLLGVKKERLSGWRLDKKGKPEIHTLKGYRNWRKIFAESGIDLATLPTETIDCLAKVLTLNTEREGIENTLAFELPELAESVKLLVLDRYKELSQSVSTQAWHRFSLKTLHLLIPELMNATSEQNTLLEQFQLKSDVRKRYSEYKKLPTKDVLTEIYNPTVNKTVSQAFKVIDALLVKYGKEQIRYITIEMPRDDNEEDEKKRIKELHAKNSQRKNDSQSYFMQKSGWSQEKFQTTIQKNRRFLAKLLYYYEQDGICAYTGLSISPELLVSDSTEIDHIIPISISLDDSINNKVLVLSKANQVKGQQTPYDAWMDGSFKKINGKFSNWDDYQKWVESRHFSHKKENNLLETRNIFDSEQVEKFLARNLNDTRYASRLVLNTLQSFFANQETKVRVVNGSFTHTLRKKWGADLDKTRETHHHHAVDATLCAVTPFVKVSRYHYAVKEETGEKVMREIDFETGEIVDEMSYREFKKSKKYERKTYQVKWPNFREQLKPVNLHPRIKFSHQVDRKANRKLSDATIYSVREKTEVKTLKSGKQKITTDEYTIGKIKDIYTVDGWEAFKKKQDKLLMKDLDEKTYERLLSIAETTPDFQEVEEKNGKVKRVKRSPFAVYCEENDIPAIRKYAKNNNGPLIRSLKYYDGKLNKHINITKDSQGRPVEKTKNGRKVTLQSLKPYRYDIYQDLETKAYYTVQLYYSDLRFVEGKYGITEKEYMKKVAEQTKGQVVRFCFSLQKNDGLEIEWKDSQCYDVRFYNFQSANSINFKGLEQEMMPAENQFKQKPYNNGAINLNIAKYGKEGKKLRKFNTDILGKKHYLYYEKEPKNIIK

SEQ ID NO: 185 - protein, 1345 aa, Streptococcus anginosus
MDQKYSIGLDIGTNSVGWAVVTDDYKVPAKKMKVLGNTDKQSIKKNLLGALLFDSGETAEATRLKRTARRRYTRRRNRLRYLQEIFAEEMNKVDENFFQRLDDSFLVDEDKRGERHPIFGNIAAEVKYHDDFPTIYHLRKHLADISQKADLRLVYLALAHMIKFRGHFLIEGQLKAENTNVQALFKDFVEVYDKTVEESHLSEMTVDALSILTEKVSKSRRLENLIAHYPAEKKNTLFGNLIALSLGLQPNFKTNFQLSEDAKLQFSKDTYEEDLEGLLGEIGDEYADLFASAKNLYDAILLSGILTVDDNSTKAPLSASMVKRYEEHQKDLKKLKDFIKVNAPDQYNAIFKDKNKKGYAGYIENGVKQDEFYKYLKGILLQINGSGDFLDKIDREDFLRKQRTFDNGSIPHQIHLQEMHAILRRQEEHYPFLKENQDKIEKILTFRIPYYVGPLARKGSRFAWAEYKADEKITPWNFDDILDKEKSAEKFITRMTLNDLYLPEEKVLPKHSLLYETFTVYNELTKVKYVNEQGEAKFFDANMKQEIFDHVFKENRKVTKDKLLNYLNKEFEEFRIVNLTGLDKENKAFNSSLGTYHDLRKILDKSFLDDKANEKTIEDIIQTLTLFEDREMIRQRLQKYSDIFTKAQLKKLERRHYTGWGRLSYKLINGIRNKENKKTILDYLIDDGYANRNFMQLINDDALSFKEEIARAQIIGDVDDIANVVHDLPGSPAIKKGILQSVKIVDELVKVMGHNPANIIIEMARENQMTDKGRRNSQQRLKLLQDSLKNLDNPVNIKNVENQQLQNDRLFLYYIQNGKDMYTGETLDINNLSQYDIDHIIPQAFIKDNSLDNRVLTRSDKNRGKSDDVPSIEVVHEMKSFWSKLLSVKLITQRKFDNLTKAERGGLTEEDKAGFIKRQLVETRQITKHVAQILDERFNTEFDGNKRRIRNVKIITLKSNLVSNFRKEFELYKVREINDYHHAHDAYLNAVVGNALLLKYPQLEPEFVYGEYPKYNSYRSRKSATEKFLFYSNILRFFKKEDIQTNEDGEIAWNKEKHIKILRKVLSYPQVNIVKKTEEQTGGFSKESILPKGESDKLIPRKTKNSYWNPKKYGGFDSPVVAYSILVFADVEKGKSKKLRKVQDMVGITIMEKKRFEKHPVDFLEQRGYRNVRLEKIIKLPKYSLFELENKRRRLLASARELQKGNELVIPQRFTTLLYHSYQIEKNYEPEHREYVEKHKDEFKELLEYISVFSRKYVLADNNLTKIEMLFSKNKDAEVSSLAKSFISLLTFTAFGAPAAFNFFGENIDRKRYTSVTECLNATLIHQSITGLYETRIDLSKLGED

SEQ ID NO: 186 - protein, 849 aa, Listeria ivanovii
  misc_feature (780)..(780): Xaa can be any naturally occurring amino acid
LIDKNGTPQHITMIDKMRGKCTYFPEEVRIAKMSYTAELFGLLNDFNNIYFADPETGEKIGFTEADKKYFIDTFIHDQKGVKNITLKQIMKHKNIINETDIFGYRINTKNGTPIFTEFKGLKALKKALKEVDLPDEFYQNTEMMDEIANILSSEKSFTRREEQLKELFLAAFNDELEEAVKELINDITFKEFHSLSKKAIMVILPELWSTNQNQMQLFVQHKMDKSRLENLQNGTKIQFDDEAILSTIAKRAHRETIKIVDAVRAKYGELDYVIVEMAREKNSDEQKKVYNRAQKKQGDFEKEMCKLLGVSELKELRLNGKQHLALKFWKEQDGKCIYSGKPIALSDIVNNFNGLLEIDHIIPISISYDDSQQNKVLCLRSENQRKGQLSPYQYLIRGMGERSFDAFKAEVLSRHFGKKKQNYLLEMEDIANNDELRKHFINRNLVDTRYAMRTFSNTLKTFYTVNGIPTKVMPVNGAMTSALRKRAKLNKDRDAGHAHHAIDALIVAAIGRLPLIKQLAELRVNEEGEFADKITDKGLDDKTAFDDKTLKFLRNLLNYESKVKYSHKVDRKPNRSLSKQTLYSTREKDGEKYIIGKVKNIYTLDKAGYAALKKRIDKNPEDFLMAQHNPKTWEEIIKIMEVYSKADNPFKEFYDEHGFIMKDGKVPVKSLRYHDKKLGIHVPLTHKYENTRHDVVLLKRNSLRVDIYMNKEGVYKYQGVPYNWFNQKGDKYILDMEKYHNEIDGTRASFKNIDNTFEFQFSLYKNDVFSYMKKDKEGEXVSYTKLFRSDSSPRENRLEVENIDMRTSSQQMPTINPLKNLIKYNTDILGNTYPIQKEKFVTVFTLHSK

SEQ ID NO: 187 - protein, 1457 aa, Prevotella buccae
MKTILGLDLGTNSIGWAKVSVDDYGNYLHDIKLGSRIIPMSQDVLGNFDSGVTVSQTAQRTEFRSKRRLVQRNLQRRERLHRVLHVLDFLPAHYDAAIGWDRTEAVTYGKFLNHAEPKLAWEELGNGKRRFLFMDSFHEMVADFARCQPALVADGKKIPLDWTIYYLRKKALTQAITKEELAWILLNFNQKRGYYQLRGEEEEENPTKQEEYYELKVVSVEATDSRKGNDTWYNVHLENGWIYRRSSKISLDDWVGKVKQFIVTTEYEKDGATLKTDKEGYVKRSFRAPNENDWGLRKKRTETLLEMSGKTVGAFIYDHLLQEPADKIRGNFIRTIERHYYKAELEAILAEQCKYHIELRDKEMLEACARELYLNNLPHQRSLMKKDMTYLLLYDLIFYQRPLKSKKALIANCPYEYYEYVDKETGEIKRQNIKCIAKSNPYFQEFRLWQFVLNLRLFDRVEDKEVTANYLPTADDHARLFTYLNDRKEINQETLLKDYFKLKKVKIGNEKEYPIRWNYIEDKEKKYPCNETRYELLMALDRAGIEHKWLDDNNLEYRLWHLLYSVEVKSESETALRKLKNDDAFVNSFLKVKPFKKEYGAYSEKAIKRLLAVMRKGFLWNEQDICDETRKRIEIIIKGDVDEKVKERMGHAAYSFDRVSDFQGLPEWLACYVVYGRHSEAMDIQHWDSPERLMAYINNFKQYSLRNPIVEQCILETLRTVHDIWKETGQIDEIHVELGREMKSTSEERARRTQNVLRNENTNLRIKSLLIELKNDTDICNVHPYSPMQQEILRIYEEGALQELNREDEDFEEISKISQMSQPSGKELNRYKLWLEQKYRSPYTGKAISLAKLFTPAYQIEHVIPQSRYFDDSFTNKVICEAEVNTLKSNLLGYEFIKKHGGEIIHCTTLGDVRIFSESEYKAFVMDHYANNKSKKDKLLMEDIPQEFLSRQMNDSRYISKVVKTLLSNIVRMADESEATSKSVIVCTGGVTDRLKKDWGLNDVWNSIVYSRFERLNRLTGTEAFGHWENKDGKRVFQTSMPLELQRGFRKKRIDHRHHAMDALVIACASRNIVNYLNNESANNPKKREDLRRQLCDKNRVIRKPWETFTQDAYNALENVVVSFKNYVRVINKATNRYEHYDENGKKRFVQQKGSELWAIRKPMHKETYYGHVNLRRKELVTLQKALDDIPSICDKKLRDYISALVEKHFNKRQLLAHFKSTDYYWQKQYVNKVYVWTFSDDIKPLVATRKLLDTSFDAKRIGTITDTGIQKILRNYLEAKGGNATLAFTPEGIAEMNQNISKYNDGKPHQPILKVRITEPMGAKYRVGQTGNKMAKYVEAQSGTNLYFAIYEDSEGKRSYTTVPLDEVAERLKQRLSPVPEKDENDVPLKFYLSPNDLVYVPTEEELQLRECKLNKDRIYKMVSSTGNECHFIPYYVANVIYNKGGFNMQMHRPQS

SEQ ID NO: 188 - protein, 1330 aa, Enterococcus italicus
MKNDYTIGLDIGTNSVGYSVVTDDYKVISKKMNVFGNTEKKSIKKNFWGVRLFESGQTAQEARMKRTSRRRIARRKNRICYLQEIFQPEMNHLDNNFFYRLNESFLVADDAKYDKHPIFGTLDEEIHFHEQFPTIYHLRKYLADGDEKADLRLVYLAIAHIIKFRGNFLIEGELNTENNSVIELSKVFVQLYNQTLSELEGFQFIDESIDFSEVLTQQLSKSERADNVLKLFPDEKGTGIFAQFIKLIVGNQGNFKKVFQLEEDQKLQLSTDDYEENIENLLAIIGDEYGDIFVAAQNLYQAILLAGILTSTEKTRAKLSASMIQRYEEHAKDLKLLKRFVKEHIPDKYAEIFNDATKNGYAGYIDGKTKEEEFYKYLKTTLVQKSGYQYFIEKIEQENFLRKQRIYDNGVIPHQVHAEELRAILRKQEKYYSFLKENHEKIEQIFKVRIPYYVGPLAKHNEQSRFAWNIRKSDEPIRPWNMNDVVDENASAVAFIERMTIKDIYLNENVLPRHSLIYEKFTVFNELTKVLYADDRGVFQRFSAEEKEDIFEKLFKSERKVTKKKLENYLRIELSISSPSVKGIEEQFNANFGTYLDLKKFDELHPYLDDEKYQDTLEEVIKVLTVFEDRSMIQNQLEQLPLNLSTKTIKALSRRKYTGWGRLSARLIDGIHDKNSGKTILDYLIEDESDSYIVNRNFMQLINDDHLSFKKIIEDSQPYKEQQSAEEIVSELSGSPAIKKGILQSLKIVDELVAIMGYKPKNIVVEMARENQTTGRGKQNSKPRLKGIENGLKEFSDSVLKGSSIDNKQLQNDRLYLYYLQNGKDMYTGHELDIDHLSTYDIDHIIPQSFLTDNSIDNRVLTTSKSNRGKSDNVPSEEVVRKMDRFWRKLLNAKLISERKYTNLTKKELTESDKAGFLKRQLVETRQITKHVATILDSKFNEDSNNRDVQIITLKSALVSEFRKTFNLYKVREINDLHHAHDAYLNAVVALSLLRVYPQLKPEFVYGEYGKNSIHDQNKATIKKQFYSNITRYFASKDYIINDDGEILWNKQETIAQVIKTLGMHQVNVVKKVEIQKGGFSKESIQPKGESQKLIRRKQQWNTKKYGGFDSPVVAYAILLSFDKGKRKARSFKIVGITIQDRESFEGNPILYLSKKDYHNPKVEAILPKYSLFEFENGRRRMVASASETQKGNQLIIPGHLMELLYHSKKIINGKNSDSVSYIQNNKEKFREIFEYIVDFSSKYISADANLNKIEKIFENNFHKASEQEIAKSFINLLTFTAMGAPADFEFFGEKIPRKRYVSISEIIDAVFIHQSITGLYETRVRLTEV

SEQ ID NO: 189 - protein, 1123 aa, Mobiluncus curtisii
MFVYLNSPRGFGPATFLTDLPHFCIIFGNNDFMDNRKYHVGIDVGTNSVGFAAVEVGDSGSPIRFLNTMVVIHDSGVDPEQKKYAITRLASAGTARRTRRLYRTRRQRLRELDDFISNELGYPLVNLENFADPYEPWKVRADLATIKLPADELPEAMSIALRHMARHRGWRSPYQRVEALHLHAEISEEFSALKKRVMEKTGDVFSDDATPAEVLVDLMGRQKIRGADGMLSGKLRQSDNANELRKIASVQGIDDETLNRIIDRVFFSRSPKGKASERVGMDALPGQGSKPRALKAMPSFQKFRIVSVICNLRIKDSGDDNRPLSMEEKEQLIGYLMSSTTDDHVTWTDVAELLHVKRSNLQGTAKEGPDGERPYTRPPVNSAWSKIKDSKIKSLVALWKTGDVDVQSAIVEALSNASVLEDARPGADIVVAYLESLDDKELESLDKVGLPAGRASYSEDSLERLTERMLQDDCDLFEARKREFGVSDDWKPPADPIYAPVGNPGVDRVLKIVNRLLMAAEREWGAPTQINIEHVRSGFSSELMQREFERENERRRAQNEEAVKAILTEKGGNSHVSKYDIIRYYAVKRQNCQCLYCGTPITFSDCELDHIVPRKGVGSTNSRVNLAAACRSCNRDKSNLPFAVWAGKTSNFDVSIDGAVSRVKQWQRSQNEGAREFRAFQNEVISRLLKTTEDPEIDSRSLESVAWMARELHHRVEYYFQSKGAQTQVSVYRGAVTAQARKSSGLEDKVKMIGGGGKTRLDRRHHAMDAATIALMTPGISTTLSEKNNLRDAQKFTGQSETWKDYCGRTETAREHFAVWKSNMERLTDLFNDKLENDAIPVVQPLRLRLSDSKAHDDGIGKLDSKKLGSVWSLADIDRAATPQIWTALTRCDDFDPTKGLPENANRVIRAQGVKYESEDNIPVFPSNVAAIAVRDGYAEIGSTIHHARIYRIDDGKKIFYSMIRVFAVDLLKHQAEDLFTVKLPPSAISIRTCEDSLRRALSNGTAEYLGWLVPGDEIIVDTSDKAFHTGQIGDLLRNFPVNSFRLTGFPSNSRLRLKPVLLAGEGLRDDAEDSIKKILSGQGWRPAINVLFSKGKPRIVRRNSLGIERPSSNNGLPFSWEA

SEQ ID NO: 190 - protein, 1054 aa, Staphylococcus lugdunensis
MNQKFILGLDIGITSVGYGLIDYETKNIIDAGVRLFPEANVENNEGRRSKRGSRRLKRRRIHRLERVKKLLEDYNLLDQSQIPQSTNPYAIRVKGLSEALSKDELVIALLHIAKRRGIHKIDVIDSNDDVGNELSTKEQLNKNSKLLKDKFVCQIQLERMNEGQVRGEKNRFKTADIIKEIIQLLNVQKNFHQLDENFINKYIELVEMRREYFEGPGKGSPYGWEGDPKAWYETLMGHCTYFPDELRSVKYAYSADLFNALNDLNNLVIQRDGLSKLEYHEKYHIIENVFKQKKKPTLKQIANEINVNPEDIKGYRITKSGKPQFTEFKLYHDLKSVLFDQSILENEDVLDQIAEILTIYQDKDSIKSKLTELDILLNEEDKENIAQLTGYTGTHRLSLKCIRLVLEEQWYSSRNQMEIFTHLNIKPKKINLTAANKIPKAMIDEFILSPVVKRTFGQAINLINKIIEKYGVPEDIIIELARENNSKDKQKFINEMQKKNENTRKRINEIIGKYGNQNAKRLVEKIRLHDEQEGKCLYSLESIPLEDLLNNPNHYEVDHIIPRSVSFDNSYHNKVLVKQSENSKKSNLTPYQYFNSGKSKLSYNQFKQHILNLSKSQDRISKKKKEYLLEERDINKFEVQKEFINRNLVDTRYATRELTNYLKAYFSANNMNVKVKTINGSFTDYLRKVWKFKKERNHGYKHHAEDALIIANADFLFKENKKLKAVNSVLEKPEIESKQLDIQVDSEDNYSEMFIIPKQVQDIKDFRNFKYSHRVDKKPNRQLINDTLYSTRKKDNSTYIVQTIKDIYAKDNTTLKKQFDKSPEKFLMYQHDPRTFEKLEVIMKQYANEKNPLAKYHEETGEYLTKYSKKNNGPIVKSLKYIGNKLGSHLDVTHQFKSSTKKLVKLSIKPYRFDVYLTDKGYKFITISYLDVLKKDNYYYIPEQKYDKLKLGKAIDKNAKFIASFYKNDLIKLDGEIYKIIGVNSDTRNMIELDLPDIRYKEYCELNNIKGEPRIKKTIGKKVNSIEKLTTDVLGNVFTNTQYTKPQLLFKRGN

SEQ ID NO: 191 - protein, 586 aa, Pseudoramibacter alactolyticus
MTYYLGLDMGTGSVGWAATDKNYKLIRAKGKDLWGVRLFQTAKTAAERRSHRVARLRRQREKVRIGYLKTIFSDAINKVDPGFFQRLDDSFFYAEDKNINQPYALFADTGYTDVDYYRDYPTIFHLRSTLIHDTSPKDVRLVYLAVLNMFKHRGHFLASNLSENGVDDFGDIYQQWCKSVPKPVQISDPEAKTEKIENILSKAGISNTRRLEALLEVFGIKRRDAFAEVLKLWCGLKGNLSKIWSETDFSDLDNTKPALSFKDSNLDMVLSQLEEILPDEDYSWLMLTKQIYDWSLLSGMMKDASGKSYDYLSDARVASYQKHSEDLKTLKRFYHDNHLSAAYDQMFRVMGKDNYSAYAGSVQSKKEVVRRGASCGIEELYKRIKKDLKPVPDCETKQIILENIERGTFLPKQLTRDNGVIPNQIHVHELKAILKNAENYLPFLKEGSELTNSEKILQLFQFQIPYYVGPLYSDENNYAWVVRKEGGRVFPWNFAEKVDEKASAEGFISELVARCTYLDNEKVLPKASLLYEKFMVLNELNNLRINGERISVDIKQELYQNLFTRGKKVTLKKSEGLFGGQRIFCL

SEQ ID NO: 192 - protein, 1385 aa, Gemella morbillorum
MKNKTWYLGLGVGPTSIGWAATDSNYKLLRKNKKRLWGVRLFEEAKTAVDRRTFRAERRRLARRKWRISLLEELFAKEVSKNDPNFFLRLKESKYHFEDKSLMNEYILFNDKDYTDKDYYKEYPTIYHLRLSLTTEENPDIRKVYLAVHSMLKNRGHFLLQGQSFNDSNIDSVIKELLELETVKINFEVTDEVIHSLKKIALEKKNLSDKNNDVKKLYPKEKQLQEIFKLVFGGKTSLDKLYDIEEYKELDNSVKSISFKEKVYEEVRPDYEQILSNYIELLDLAKLVYDSIVLADIKKEGKTISESKVELYNKHKDDLANLKKLVKIDSKLSEDKKKEVYFTIFKEDKEKGTNYVNYTHRSQEGKSCSYEDFKKFLKKELEKLEDSPTKTTILEELDLETFLPLQRTKDNSVVPYQIHKEELVKILDNAAKYHSFLAEKDDSGYSTREKVVQLFEFRIPYYIGPLNAHHNTENGGYSWAIRKKGMESVPVTPWNFKDVIDESASAEAFVNNLKNKCAYLSGEDVLPKNSLLYSEYALLNELNALRYEGNRISVEARDVIVTKLFKEQGKKVTKKTIKELLKTEGFIDGKGEIVGIDNIVKNDLKSYRDFKKILADKFDKERVENIILWITLYGESRKLIKEKITKVYGDFYTVDEIEKMSRLTYKDWGILSRKLLTELVSEKLYNEETGECLNIIGAMRQGTILFMELLADKFDYMSQIKNHNKENKDDITEITPDILENLHASPAVKRSIWQTVRIVEELKTIIGCVPTKIFIETTKRNNAPYKVPTLNRNDLVTKYKTIREHEIFELEKELKNTLDFTLNKNRLINEEPSKLKATKLYLYYTQLGRCMYTGKKIDLGELFDNNNKYDIDHIYPQSKVKDGSFNNIVLVTKASNDMKADVFPLKSKFQTKENKIFWRFLKEKKLITEEKYNRLVRTEEFSNGELTGFITRQLVETSQAIKVISNVLRELNPETTICYSKAENVSSFRQSFGKIKEANRKAENNEKLIRVQEINDYYNAKDAYLSIVVGNVYDVKFTRNVHNFIKNNKDARRYSLNGLFYTDVKNANTIAWEMDKTVHVVEKTMNNNNILITRRTSEQKGALYDATLYKAKVAEKAKEGTYYPLKTTDSKIKDVGKYGGFTKIKIAYYSIFEYTLDGKKGKQKITRIVPIPIYISQNIKDDKALLEYAQTRLPGKDLKIKYRKLCIGSLVKINNFNYYIGGKTNNNFTFDSAVQVILDKDSESYIKELAKYLNWKKENKDGKLWESITEDKNIQLYDSLVKKMNTGIFIRKTPNKYTELLTLEVKNKFINIDIDEQVKLLLEILNLLTNKKFTSKLNEIGITASRGVCSFNLSNQSQFSIIEQSVTGVYEKEKLIIEKKKEGIL

SEQ ID NO: 193 - protein, 1029 aa, Alicycliphilus denitrificans
MRSLRYRLALDLGSTSLGWALFRLDACNRPTAVIKAGVRIFSDGRNPKDGSSLAVTRRAARAMRRRRDRLLKRKTRMQAKLVEHGFFPADAGKRKALEQLNPYALRAKGLQEALLPGEFARALFHINQRRGFKSNRKTDKKDNDSGVLKKAIGQLRQQMAEQGSRTVGEYLWTRLQQGQGVRARYREKPYTTEEGKKRIDKSYDLYIDRAMIEQEFDALWAAQAAFNPTLFHEAARADLKDTLLHQRPLRPVKPGRCTLLPEEERAPLALPSTQRFRIHQEVNHLRLLDENLREVALTLAQRDAVVTALETKAKLSFEQIRKLLKLSGSVQFNLEDAKRTELKGNATSAALARKELFGAAWSGFDEALQDEIVWQLVTEEGEGALIAWLQTHTGVDEARAQAIVDVSLPEGYGNLSRKALARIVPALRAAVITYDKAVQAAGFDHHSQLGFEYDASEVEDLVHPETGEIRSVFKQLPYYGKALQRHVAFGSGKPEDPDEKRYGKIANPTVHIGLNQVRMVVNALIRRYGRPTEVVIELARDLKQSREQKVEAQRRQADNQRRNARIRRSIAEVLGIGEERVRGSDIQKWICWEELSFDAADRRCPYSGVQISAAMLLSDEVEVEHILPFSKTLDDSLNNRTVAMRQANRIKRNRTPWDARAEFEAQGWSYEDILQRAERMPLRKRYRFAPDGYERWLGDDKDFLARALNDTRYLSRVAAEYLRLVCPGTRVIPGQLTALLRGKFGLNDVLGLDGEKNRNDHRHHAVDACVIGVTDQGLMQRFATASAQARGDGLTRLVDGMPMPWPTYRDHVERAVRHIWVSHRPDHGFEGAMMEETSYGIRKDGSIKQRRKADGSAGREISNLIRIHEATQPLRHGVSADGQPLAYKGYVGGSNYCIEITVNDKGKWEGEVISTFRAYGVVRAGGMGRLRNPHEGQNGRKLIMRLVIGDSVRLEVDGAERTMRIVKISGSNGQIFMAPIHEANVDARNTDKQDAFTYTSKYAGSLQKAKTRRVTISPIGEVRDPGFKG

SEQ ID NO: 194 - protein, 1422 aa, Sutterella wadsworthensis
MTQSERRFSCSIGIDMGAKYTGVFYALFDREELPTNLNSKAMTLVMPETGPRYVQAQRTAVRHRLRGQKRYTLARKLAFLVVDDMIKKQEKRLTDEEWKRGREALSGLLKRRGYSRPNADGEDLTPLENVRADVFAAHPAFSTYFSEVRSLAEQWEEFTANISNVEKFLGDPNIPADKEFIEFAVAEGLIDKTEKKAYQSALSTLRANANVLTGLRQMGHKPRSEYFKAIEADLKKDSRLAKINEAFGGAERLARLLGNLSNLQLRAERWYFNAPDIMKDRGWEPDRFKKTLVRAFKFFHPAKDQNKQHLELIKQIENSEDIIETLCTLDPNRTIPPYEDQNNRRPPLDQTLLLSPEKLTRQYGEIWKTWSARLTSAEPTLAPAAEILERSTDRKSRVAVNGHEPLPTLAYQLSYALQRAFDRSKALDPYALRALAAGSKSNKLTSARTALENCIGGQNVKTFLDCARRYYREADDAKVGLWFDNADGLLERSDLHPPMKKKILPLLVANILQTDETTGQKFLDEIWRKQIKGRETVASRCARIETVRKSFGGGFNIAYNTAQYREVNKLPRNAQDKELLTIRDRVAETADFIAANLGLSDEQKRKFANPFSLAQFYTLIETEVSGFSATTLAVHLENAWRMTIKDAVINGETVRAAQCSRLPAETARPFDGLVRRLVDRQAWEIAKRVSTDIQSKVDFSNGIVDVSIFVEENKFEFSASVADLKKNKRVKDKMLSEAEKLETRWLIKNERIKKASRGTCPYTGDRLAEGGEIDHILPRSLIKDARGIVFNAEPNLIYASSRGNQLKKNQRYSLSDLKANYRNEIFKTSNIAAITAEIEDVVTKLQQTHRLKFFDLLNEHEQDCVRHALFLDDGSEARDAVLELLATQRRTRVNGTQIWMIKNLANKIREELQNWCKTTNNRLHFQAAATNVSDAKNLRLKLAQNQPDFEKPDIQPIASHSIDALCSFAVGSADAERDQNGFDYLDGKTVLGLYPQSCEVIHLQAKPQEEKSHFDSVAIFKEGIYAEQFLPIFTLNEKIWIGYETLNAKGERCGAIEVSGKQPKELLEMLAPFFNKPVGDLSAHATYRILKKPAYEFLAKAALQPLSAEEKRLAALLDALRYCTSRKSLMSLFMAANGKSLKKREDVLKPKLFQLKVELKGEKSFKLNGSLTLPVKQDWLRICDSPELADAFGKPCSADELTSKLARIWKRPVMRDLAHAPVRREFSLPAIDNPSGGFRIRRTNLFGNELYQVHAINAKKYRGFASAGSNVDWSKGILFNELQHENLTECGGRFITSADVTPMSEWRKVVAEDNLSIWIAPGTEGRRYVRVETTFIQASHWFEQSVENWAITSPLSLPASFKVDKPAEFQKAVGTELSELLGQPRSEIFIENVGNAKHIRFWYIVVSSNKKMNESYNNVSKS

SEQ ID NO: 195 - protein, 1132 aa, Nitratifractor salsuginis
MKKILGVDLGITSFGYAILQETGKDLYRCLDNSVVMRNNPYDEKSGESSQSIRSTQKSMRRLIEKRKKRIRCVAQTMERYGILDYSETMKINDPKNNPIKNRWQLRAVDAWKRPLSPQELFAIFAHMAKHRGYKSIATEDLIYELELELGLNDPEKESEKKADERRQVYNALRHLEELRKKYGGETIAQTIHRAVEAGDLRSYRNHDDYEKMIRREDIEEEIEKVLLRQAELGALGLPEEQVSELIDELKACITDQEMPTIDESLFGKCTFYKDELAAPAYSYLYDLYRLYKKLADLNIDGYEVTQEDREKVIEWVEKKIAQGKNLKKITHKDLRKILGLAPEQKIFGVEDERIVKGKKEPRTFVPFFFLADIAKFKELFASIQKHPDALQIFRELAEILQRSKTPQEALDRLRALMAGKGIDTDDRELLELFKNKRSGTRELSHRYILEALPLFLEGYDEKEVQRILGFDDREDYSRYPKSLRHLHLREGNLFEKEENPINNHAVKSLASWALGLIADLSWRYGPFDEIILETTRDALPEKIRKEIDKAMREREKALDKIIGKYKKEFPSIDKRLARKIQLWERQKGLDLYSGKVINLSQLLDGSADIEHIVPQSLGGLSTDYNTIVTLKSVNAAKGNRLPGDWLAGNPDYRERIGMLSEKGLIDWKKRKNLLAQSLDEIYTENTHSKGIRATSYLEALVAQVLKRYYPFPDPELRKNGIGVRMIPGKVTSKTRSLLGIKSKSRETNFHHAEDALILSTLTRGWQNRLHRMLRDNYGKSEAELKELWKKYMPHIEGLTLADYIDEAFRRFMSKGEESLFYRDMFDTIRSISYWVDKKPLSASSHKETVYSSRHEVPTLRKNILEAFDSLNVIKDRHKLTTEEFMKRYDKEIRQKLWLHRIGNTNDESYRAVEERATQIAQILTRYQLMDAQNDKEIDEKFQQALKELITSPIEVTGKLLRKMRFVYDKLNAMQIDRGLVETDKNMLGIHISKGPNEKLIFRRMDVNNAHELQKERSGILCYLNEMLFIFNKKGLIHYGCLRSYLEKGQGSKYIALFNPRFPANPKAQPSKFTSDSKIKQVGIGSATGIIKAHLDLDGHVRSYEVFGTLPEGSIEWFKEESGYGRVEDDPHH

SEQ ID NO: 196 - protein, 1327 aa, Solobacterium moorei
MEGQMKNNGNNLQQGNYYLGLDVGTSSVGWAVTDTDYNVLKFRGKSMWGARLFDEASTAEERRTHRGNRRRLARRKYRLLLLEQLFEKEIRKIDDNFFVRLHESNLWADDKSKPSKFLLFNDTNFTDKDYLKKYPTIYHLRSDLIHNSTEHDIRLVFLALHHLIKYRGHFIYDNSANGDVKTLDEAVSDFEEYLNENDIEFNIENKKEFINVLSDKHLTKKEKKISLKKLYGDITDSENINISVLIEMLSGSSISLSNLFKDIEFDGKQNLSLDSDIEETLNDVVDILGDNIDLLIHAKEVYDIAVLTSSLGKHKYLCDAKVELFEKNKKDLMILKKYIKKNHPEDYKKIFSSPTEKKNYAAYSQTNSKNVCSQEEFCLFIKPYIRDMVKSENEDEVRIAKEVEDKSFLTKLKGTNNSVVPYQIHERELNQILKNIVAYLPFMNDEQEDISVVDKIKLIFKFKIPYYVGPLNTKSTRSWVYRSDEKIYPWNFSNVIDLDKTAHEFMNRLIGRCTYTNDPVLPMDSLLYSKYNVLNEINPIKVNGKAIPVEVKQAIYTDLFENSKKKVTRKSIYIYLLKNGYIEKEDIVSGIDIEIKSKLKSHHDFTQIVQENKCTPEEIERIIKGILVYSDDKSMLRRWLKNNIKGLSENDVKYLAKLNYKEWGRLSKTLLTDIYTINPEDGEACSILDIMWNTNATLMEILSNEKYQFKQNIENYKAENYDEKQNLHEELDDMYISPAARRSIWQALRIVDEIVDIKKSAPKKIFIEMAREKKSAMKKKRTESRKDTLLELYKSCKSQADGFYDEELFEKLSNESNSRLRRDQLYLYYTQMGRSMYTGKRIDFDKLINDKNTYDIDHIYPRSKIKDDSITNRVLVEKDINGEKTDIYPISEDIRQKMQPFWKILKEKGLINEEKYKRLTRNYELTDEELSSFVARQLVETQQSTKALATLLKKEYPSAKIVYSKAGNVSEFRNRKDKELPKFREINDLHHAKDAYLNIVVGNVYDTKFTEKFFNNIRNENYSLKRVFDFSVPGAWDAKGSTFNTIKKYMAKNNPIIAFAPYEVKGELFDQQIVPKGKGQFPIKQGKDIEKYGGYNKLSSAFLFAVEYKGKKARERSLETVYIKDVELYLQDPIKYCESVLGLKEPQIIKPKILMGSLFSINNKKLVVTGRSGKQYVCHHIYQLSINDEDSQYLKNIAKYLQEEPDGNIERQNILNITSVNNIKLFDVLCTKFNSNTYEIILNSLKNDVNEGREKFSELDILEQCNILLQLLKAFKCNRESSNLEKLNNKKQAGVIVIPHLFTKCSVFKVIHQSITGLFEKEMDLLK

SEQ ID NO: 197 - protein, 738 aa, Treponema phagedenis
MLQELFAKEIAKIDEGFFRRLDESAFYLEDKSLKQKYSLFNDDNFTDKDYYKKFPTIHHLIKALINDETHVDIRLLYLACHTIIKNRGHFLFEGKEFNTESRFDDAINELFSYLRQDMEIDFAFEDKIADIKEILENKKIGMRDKQNALNKKLSIAPKDKQKKEIIKLIVGASFNLKTLFNDEKYSSEKESYSFAKSNYEEKEAVLESLLGDGFGLILRAKAVYDSSVLSEILGNETYLSFAKVKIYDKHKEDLAKLKKVIKTYHADEFKKVFAEANIQGNYCSYVGSCKKNGKKVPIEKRADKDAFYDFLKKILKDEKAKNSDADYAFILNEIELKTFLPKQVSKKNANIPYQLRRMELEKIVNNAEKYFSFLSEKDEYGTVKEKIIQLLTFKRPYYIGIIQDTHKEKFPDRCWVVKKENAKNEKITPWNFYDHIDEDKTAEAFITSRTNKCTYLIGEDVLPRNSLLYMEYTVLNELNNLKVSVDGVNIFDVKLKKKIYEQVFKQRKEVSKKTIADFLKKEGICKKENDVVITGIDEKCTTSLKLYIDIKKIIGKRIEEEPTKNALEDIILWASIYDEGEGRKILEAKIQSVYPDVFTQDELNKILKLKISGWGRFSRKFLESIVASFPGFTDTINIITAMRETNFNLMELLGDAYGFSKGIEKFNSKFNDDKKVFSYDKLVKDLYLSPSVKRMLWRALVIVKEVKSIMGKDPKKYLLKWQEEKKLKREGLPPAMQV

SEQ ID NO: 198 - protein, 1377 aa, Streptococcus equinus
MEKTYSIGLDIGTNSVGWAVITDDYKVPAKKMKVLGNTDKKYIKKNLLGALLFDSGETAEATRLKRAARRRYTRRKNRLRYLQEIFAKEMAKVDESFFQRLEESFLTDDDKTFDSHPIFGNKAEEDTYHQEFPTIYHLRKHLADSPEKVDLRLVYLALAHMIKFRGHFLIEGQLNAENTDVQKIFADFVGVYDRTFDDSHLSEITVDAASILTEKISKSRRLENLIKQYPTEKKNTLFGNLVALALGLQPNFKTNFKLSEDAKLQFSKDTYDEDLEELLGKIGDDYADLFTAAKNLYDAILLSGILTVDDNSTKAPLSASMIKRYEEHHEDLEKLKTFIKVNNFDKYHEIFKDKSKNGYAGYIENGVKQDIFYKHLKSIISEKNGGQYFLDKIEREDFLRKQRTFDNGSIPYQIHLQEMRTILRRQGEYYPFLKENQAKIEKILTFRIPYYVGPLARKNSRFAWAKYHSDEPITPWNFDEVVDKEKSAEKFITRMTLNDLYLPEEKVLPKHSYVYETFAVYNELTKIKYVNEQGKSFFFDANMKQEIFDHVFKENRKVTKAKLLSYLNNEFEEFRINDLIGLDKDSKSFNASLGTYHDLKKILDKSFLDDKTNEQIIEDIVLTLTLFEDRDMIHERLQKYSDIFTSQQLKKLERRHYTGWGRLSYKLINGIRNKENNKTILDFLIDDGDANRNFMQLINDDSLSFKTTIQEAQVVGDVDDIEAVVHDLPGSPAIKKGILQSVKIVDELVKVMGHNPQNIVIEMARENQITGYGRNRSNQRLKRLQDSLKEFGSDILSKKKPSYVDSKVENSHLQNDRLFLYYIQNGKDMYTGEELDIDHLSDYDIDHIIPQAFIKDNSIDNRVLTSSAKNRGKSDDVPSIEIVRNRKSYWYKLYKSGLISKRKFDNLTKAERGGLTETDKAGFIKRQLVETRQITKHVAQILDARFNTKCDENDKVIRDVKVITLKSSLVSQFRKEFKFYKVREINDYHHAHDAYLNAVVGTALLKKYPKLAPEFVYGEYKKYDVRKLVAKSSDNHSELGKATAKYFFYSNLMNFFKTEVKYADGRVFERPDIETNADGEVVWNKQRDFNIVRKVLSYPQVNIVKKVEVQTGGFSKESILPKGDSDKLIPRKTKKLQWETQKYGGFDSPTVAYSVLVVADVEKGKTRKLKTVKELVGISIMERSSFEENPVSFLEKKGYHNVQEDKLIKLPKYSLFEFEGGRRRLLASATELQKGNEVVLPQYMVNLLYHSQHVNNSHKPEHLNYVKQHKDEFKDIFNLIISIARINILKPKVVDNLINEFTEYGQEDISSLSESFINLLKFISFGAPGAFKFLKLDVKQSNLRYKSTTEALSATLIHQSVTGLYETRIDLSKLGEE

SEQ ID NO: 199 - protein, 1128 aa, Streptococcus vestibularis
MSDLVLGLDIGIGSVGVGILNKVTGEIIHKNSRIFPAAQAENNVERRTNRQGRRLTRRKKHRRVRLNHLFEESGLITDFTKVSINLNPYQLRVKGLIDELSNEELFIALKNMVKHRGISYLDDASDDGNSSVGDYAQIVKENSKQLETKTPGQIQLERYQKYGQLRGDFTVEEDGKKHRLINVFPTSAYRSEALRILQTQKEFNPQITDEFINRYLEILTGKRKYYHGPGNEKSRTDYGRYTTKKDSENEYITLDNIFGILIGKCTFYPEEYRAAKASYTAQEFNLLNDLNNLTVPTETKKLSEEQKNQIINYVKNEKAMGPAKLFKYIAKLLSCDVADIKGYRIDKSDKAEIHTFEAYRKMKTLETIDFEKMSRDQLDKLAYVLTLNTEREGIQEALDHEFADGNFSQEQIDELVQFRKANSSIFGKGWHNFSVKLMMELIPELYATSEEQMTILTRLGKQKTTSSSNKTKYIDEKLLTEEIYNPVVAKSVRQAIKIVNAAIKEYGDFDNIVIEMARETNEDDEKKAIQKIQKANKDEKDAAMLKAANQYNGRAELPHSVFHGHKQLATKIRLWHQQGERCLYTGKTISIHDLINNPNQFEIDHILPLSITFDDSLANKVLVYATANQEKGQRTPYQALDSMDDAWSFRELKAFVRESKSLSNKKKEYLLTEEDISRFDVRKKFIERNLVDTRYASRVVLNALQEHFRAHKTDTKVSVVRGQFTSQLRRHWGIEKTRDTYHHHAVDALIIAASSQLNLWKKQKNTLVNYSENQLLDIETGELISDDEYKESVFKAPYQHFVDTLKSKEFEDSILFSYQVDSKFNRKISDATIYATRQAKVGKDKKDETYVLGKIKDIYSQTGYDAFIKIYQKDKSKFLMYRHDPQTFEKVIEPILENYPNKEMNEKGKEVPCNPFLKYKEEHGDYIRKYSKKGNGPEIKSLKYYDSKLGNHIDITPKDSNNKVVLQSVSPWRADVYFNKTTGKYEILGLKYADLQFEKGTGTYKISQEKYNVIKKKEGVDSDSEFKFTLYKNDLLLIKDTETKEQQLFRFLSRTKPNVKHYVELKPYDKQKFEGNESLINVLGAVAKGGQCQKGINKPNISIYKVRTDVLGNQHIIKNEGDKPKLDF

SEQ ID NO: 200 - protein, 1080 aa, Methylocystis sp.
MRVLGLDGGIASIGWALIEIFEDHEPSDGRIIDTGAWMFDAPEEKSQTGTKLKSELRRIFRGQRRVIRRRRQRMNEVRRILHRHGLLSSDNRDALKQPGLDPWKIRAEGIDRLLSPIEFAVALGHIARHRGFKSNSKGAKTSDLDAESSRMKKAVGETREKLARFGSPAKLLVEDEGFVLRQTKLKSGALETVRRFRNRDGDYSRSLLRDDLAAEVRALFRAQARLQSTFAKVELEAEFTQAAFFQRPLQDSERLVGPCPFEPAEKRSPKRGYSFELFRFLSRLNHLTLREGSEERTLTVEELRTAAADFGGVAKFTFSTLRKRLALPDIAIFVGIKADDEKKLDVVARSGEAATGTARLRRVVIDALGELAWGALISAPERLDKITEIITFRSDLDRIRAGLIEAGFDTPLIEAIVRAAADGKLDAFTGVGHISAKAARNIIPGLMRGMTYDKACAAAGYDHTASRERDAFDVGMHGKEALKKILQEERISRELVGSPSARKALIEAVKQVKAIIEKYGVPDRIHVELARDVGKSIEERRDIHFGIEKRSRQKDKLRELFGKEVGHLPQDGERGKEELLRFELWNEQMGRCLYTDEYINPKQLVASDNSVQVDHILPWSRFGDDSYLNKTLCTAKANQDKKGRTPYEWFRADKPEAEWDAFVARVESIQFMKGLKKRNYKLKNAEEAAEKFRSRNLNDTRWTCRLLAEALKQLYPKGEKDKDGKERRRVFTRPGALTNRLRRAWSLQRRKKSEKGERIADDRHHALDAIIVAATTESLLIRATREVQDIERKGLHYDLTKNITQPWPGFADEALDAVEKVFVARAERRRARGKAHDATIRHIAVRDDEAKVYERKKVGDIKLGDLIRVKDAERNAPLIENLRKWIEAGSPRDNPPLSPKGDPVSKVRLVTKNKVNITLDTGNPERLATVDRGEMARVDVFRKANRKGKYEYYLVPIYPHEIATMETPPMRAVQGGGDDDKWPEIDSTFEFLWSINQLSLLELTKPDGEVIRSYFRSLDRNTGALTVSGIANSTATRKGIGTRTLIDFKKLHVDRLGQIFEVERELRTWRGETWRGKDCI

SEQ ID NO: 201 - protein, 1087 aa, Phascolarctobacterium succinatutens
MLRMKYAIGLDIGIASVGYAVLALDHEENPWGIIRLGSRIFDVAENPKDGASLALPRREARSVRRRLRRHHHRLERIKNLLINTEFITKDELLHLYDGNLSDVYELRVKALDYSVTNAELTRILLHLAQRRGFKSNRKSDANDKEAGQLLEAVSANAKRMQENHYRTVGEMFYKDDLFSKYKRNKGGTYLTTVHRDMIAAEARTILEKQFALGNNICTQDFIDKYLSILLSQRQFDEGPGEPSPYAGNQIANMIGKCTFEPNEYRAAKASYSFERFNLLQKVNHLRLLLEGKSIALDNEQRKKIIALAHDKADLRYSHIRKALGLDEKVLFNTITYNDDVSVIEKKTKFNFLQAYHQIKKVLAEDMQKLTTEQLDNIGQILSTYKSDNKRTEELSALGLEKKIIDALLGINGLSKFAHLSLKALRKINPYLEEGKIYNEACTAAGYDFKAHANTQKTELLPAYKEEMDDITSPVARRAIAQSIKVINAIIREQKGSPLYINIELAREMAKGFDERTQIDKANKENQAKNERIMERIRTEFHKANPTGMDLIKLKLWEEQDGRSPYSQKAISINRLFEPGYVDIDHIVPYSISFDDSFKNKVLVFSDENRDKGNRLPIAYLQSKFGAKAAENFMIWVQSNIKDYKKRQKLLKREITEEDINKFKERNLQDTKTISRFLYNYINDYLLFAPSDTGKKKRVTAVNGTITAYLRKRWGINKIRANGDKHHAVDAVVIACTTDKMIKDLSSFSRYHELEYTHTDTESFLVNSLTGEILKRFPYPWEDFRPELMARLSDNPADALRKLNLIFYHGIDLSTIKPIFVSRMPRHKVTGAAHKATIKSARCLDNGIVICKTSLQNLKLDKEGEIANYYAPESDTILYNALKERLRSYDNKPAKAFAEPFYKPKADGTPGPLVKKVKVYEKSTLNVAVQQNTAVADNDSMVRVDVFHVKGNGYYLVPIYIADTLKKELPNKAIVAYKPYADWPVMDDSNFIFSLYPNDLIKFEHKNSVKFAKVNKESTLNDFYSTKSEIVYFKGCNINTGAITIINHENTYVVSSLGVKTLPSLEKYQADVLGNYTKVKKEVRKPFR

SEQ ID NO: 202 - protein, 1375 aa, Lactobacillus ruminis
MRKNQEPYNIGLDIGTSSIGWSIMNDNFDLMRVKGKKGIGVRLYNEGQSAAERRMHRTARRRYGRRKWRLRLLEDFFDEHMAEVDDTFFARLKDSNISPKDDKKYRKSLLFPKSKGVTYQDDGEFYKKYPTMYHLRYALMTEHRKFDLREIYLAFHHMVKYRGNFLYDTSVDSFEAKNLDIKGKFDEINDLLSSYTDFYVDNSNAALVESILLEKNTTRKDKSKKIAKLLHVEDKEKGKNKKAKDLATQISNAVLGLKCNFHLIFELQQKYSFDLCSEKTEENIAKLSEVLDENQKMLLMILKEVQDQVMLNAFVPSGMSLSEAMMQKYDDYGEQLKIYHELEHSVSDDSAAKLRGAYRDYNDNIIKRIDGDNKKDTFYKRVKNILTKISKEYVDQDVLESCGKLKKLIDENKLFIRQRTAANGVLPHQLHQIEMRKIIDNQKEYYPWLAEPNPNEKRRVYSKYKVEELIAFRIPYYVGPLVDPNNADKNKEARFSWMVRKKDGEITPWNFYDKVDWAESANNFIERMKSKDTYLLGEDVVPKESMLYQKYEVLNELNNLRINDSGLSDSFEDVKLKQAIYNDLFKKQKIVKITDLQNYLVQNHKYLVKPKISGLADENRFLSSLSTYSDLKTIFGDKVDDRTYFNDFEKMVEYSTVFEDGHDYNQKLDEYTWLTKEEKYKIGKKRYRGWGKLSKKLLTGLRDKNNHTIMDNLWETNRNFMQIQTADEFSKQIAEENERHLKGSVSDAINDMYTSPANKKAIRQVLRVVDDIQKAMGYAPSSISLEFAREDGPSVRTVSRANRMKSIYEKYASEVSEEVMKDLDGVIKDKKGLNDRLYLYFEQQGKDMYSGHPLDFDKVISGQEYDIDHILPQAVIKDDSLDNRVLTTKALNNDVKSKGVPCRMFNGMHSFWKNLYDKGFISRRKFNNLTTNPENIDKYKMKGFVNRQLVETRQIIKLVANVLNDKYQNDDVDIIEVRAELTHDVRKHFKFYKNRNVNDYHHAFDAYLTSFIGHYLFKKYPNLRPLFDYNDFMKVSDNVFKQLRGNNFLGEFLNKTGDIISTDGNFVLNKEEMINKLNKAYAFKKILVTKEVGQRTGAMFNETRYPAPNSRKAALKYRRMPKPDSLISVKDYKNTDIYGGYSGKNDAYMVIVDMGKQYMVVGVPVRYTEKLDKLRIKHSELYRDELRKVLSRDKTLLDSKGNVKRFDIVLDRVLYGQLIEDGNELFTLGSSKYKRNFRQLFLDKQCIEILDSSATPQPTDEELIWVYDQILDKVDKYFELYDINRQRETLRKGRAAFCSLPNISMKKDDVTKKKILNEILVALHANESESNCEKIGKKVFGRLQVPGGIKLSKEAKLIYQSPTGLFERVVYLKDL

SEQ ID NO: 203 - protein, 1391 aa, Prevotella oralis
MKKILGLDLGTTSIGWALVNEKENNEELSSIIRLGVRVNPLTVDEKSNFEKGKDITTNADRTKCRSARRNLQRFKLRREALADCLKRHGLMTDETPLCETNNSIIFKTYSNRAKAVCEKIALDDFVRVLFMINKKRGYKSSRKLNTDDEGTLVDGMDVAKLLYNEQITPGEYLLRLFKKGKKTRPDFYLSDLKAELERIWDFQRTFYPEILCNALKEDLKGKSRTQSSAIFYAKYKVSTAKIAGKDKRLQELTWRTDALRKQLTIDEVAYVICSINGEVNGSSQRLSMISDRSKLLYFNHQTIGQYLMQRLEENPNAGLKNIIFYRQDYEDEFNDIWNSQATYHKELTPELKKEVKDIIFYQRGLKSCKWLINYCELEHEEIEVKTPEGKLRKITIGSKTCPKSSPLFQEFKIWQVLNNLQVSPLNSRRKAKRKKDEEPSLFSDEDMNTACRYLNEEEKLTLFKELSIKKELKKKDALKLLFENYKELDLNYKVISGNVTMANLYRAFQDIISLTGNGEFDFQAMPAEEAEKTVEEIFGGLGYKTAFLHFDASLHDKEFERQPAYRLWHLLYSYAGDQSKTGIEALVKRIQELCGFEPEYARILANISFIPDYGNLSSKAMRKILPYMQDGYEYSEACSKAGYRHSASSLTKEEINKKNYKTHLDEIKRNSLRNPIVEKILNQMVNVVNSVIDTYSNIDEIRIEMARELKKSKPEREDMSFAISKATKETERIKGILEQEFKIQHVTRNDIIRYRLYEELKPNGYKTLYSNTYIPREDLFSKKFDIEHIIPKARLFDDSYSNKTLELRDINIEKGNQTAYDFVLSKYGEEGLYKYEQRVEEFKKNNEQAGTKCRKLLMREADIPSDFLNRDLNDSQYIAKKAHELLREIVPTVTATTGSITNRLREDWKLVNVMKELNWEKYDKLGLTEEYKDKDGNTVRHIKDWTKRNDHRHHAMDALTIAFTKPSFIQYLNNLNARSNRGGSIYGIEQKELERENNKLVFIPPIDPKIFRKQAKEHLSNILISIKAKNKVVTKNVNKTKSKSGTNRKVQLTPRGQLHLETVYGKIRTYKTEEIKVGTKLTEELIAKVADKKIREALMQRLSEYGGNIKKAFQNISKHPIWLNGSHTKHVPEKVKIVFFEDVFTIRKAITPDIKIDKVIDSKIRRILQERLNEFGGEASKAFSNLDENPIWFNRDKGIAIKSVKIRGIAKGTAIRVKKDIHGKTIIGNNGYPVANDYVNTGNNHHVAIFRDKDGNLQEHIVSFYEATARAIQNLPIVDRNYNSEKDWKFLFSMKQNEYFVFPNPNTGFNPSEISLKDEKNYALISPNLFRVQKLSHYYYVFRHHLETNVDTNLQLKDITWKRITAVNNLTGAVKVRIDHLGRIVDVGEYK

SEQ ID NO: 204 - protein, 1167 aa, Streptococcus sanguinis
MLFGLKTKFKDCFELEEEPDLNFSKENYDDNLEKLLGELGEDFSDVFDKLKILRDTILLSGMLTYTGATHARFSATMVERYEEHRKDLQRFKSFIKQNLSEQDYLDIFGRKTQNGFDVDKETKGYVGYITNKMVLTNPQKQKTIQQNFYDYISGKITGIEGSEYFLNKISDRTFLRKLRTSDNGAIPNQIHAYELEKIIERQGKDYPFLLENKDKLLSILTFKIPYYVGPLAKGNNSRFAWIKRANSSDILDDNDEDTRNGKIRPWNYHKLINMDETRDAFITNLIGNDTILLNEKVLPKRSLIYEEVMLQNELTRVKYKDKYGKAHFFDSEHRQNIINGLFKINSKRVNAERLIKYLSDNHKDLNAIEIVSGVEKGKSFNSTLKTYNDFKTIFSEEFLDSEIYQKELEEIIKVITVFDDKKSIKNYLTKYFGHLEFLDEEKINQLSKLRYTGWGRYSAKLLLDIRDEDTGFNLLQFLRNDEENRNLTNLISDNTLSFDPKIKAIQSKSTVEDDVFDEIKKLAGSPAIKRGILNSIKIVDELVQIIGYPPQNIVIEMARENMTTEEGQKKTKTRKSKLESALKNIENSVLENGKVLHSDEQLQSEKLYLYYLQNGKDIYSLDETGSPAPIYLDQLDQYEVDHIIPYSFLPIDSIDNKVLTHRKNNQRKLDNIPDKETVAHMKPFWEALYNAKLISQTKYQRLTTSERTPDGVLTESMKAGFIERQLVETRQIIKHVARILDNRFSDTKIITLKSQLVTNFRNTFHIAKIRELNDYHHAHDAYLAVVVGQTLLKAYPKLAPELIYGHHVHFNRHEENKATLRKHLYSNIMRFFNNPDSKVSKDIWDCNRDLPIIKHVIYNSQINFVKRTMIKKGAFYNQNPVGKFNKQLAANNRYPLKTKALCLDTSIYGGYGPMNSTLSIIIIAERFNEKKGKIETVKEFHDIFIIDYEKFNNNPFQFLNDTSENGFLKKNNINRVLGFYRIPKYSLMQKIDGTRMLFESKLNLHKATQFKLTKTQNELFFHMKRLLTNSNLMDLKSESAIKESQNFILKHKEEFDNISNQLSAFSQKMLGNTTSLKNLIKGYNERKIKEIDIREETIKYFYDNFIKMFSFVKSGAPKDINDFFDNKYTVARMRPKPDKRLLNATLIHQSITGLYETRIDLSKLGED

SEQ ID NO: 205 - protein, 1334 aa, Staphylococcus pseudintermedius
MGRKPYILSLDIGTGSVGYACMDKGFNVLKYHDKDALGVYLFDGALTAQERRQFRTSRRRKNRRIKRLGLLQELLAPLVQNPNFYQFQRQFAWKNDNMDFKNKSLSEVLSFLGYESKKYPTIYHLQEALLLKDEKFDPELIYMALYHLVKYRGHFLFDHLKIENLTNNDNMHDFVELIETYENLNNIKLNLDYEKTKVIYEILKDNEMTKNDRAKRVKNMEKKLEQFSIMLLGLKFNEGKLFNHADNAEELKGANQSHTFADNYEENLTPFLTVEQSEFIERANKIYLSLTLQDILKGKKSMAMSKVAAYDKFRNELKQVKDIVYKADSTRTQFKKIFVSSKKSLKQYDATPNDQTFSSLCLFDQYLIRPKKQYSLLIKELKKIIPQDSELYFEAENDTLLKVLNTTDNASIPMQINLYEAETILRNQQKYHAEITDEMIEKVLSLIQFRIPYYVGPLVNDHTASKFGWMERKSNESIKPWNFDEVVDRSKSATQFIRRMTNKCSYLINEDVLPKNSLLYQEMEVLNELNATQIRLQTDPKNRKYRMMPQIKLFAVEHIFKKYKTVSHSKFLEIMLNSNHRENFMNHGEKLSIFGTQDDKKFASKLSSYQDMTKIFGDIEGKRAQIEEIIQWITIFEDKKILVQKLKECYPELTSKQINQLKKLNYSGWGRLSEKLLTHAYQGHSIIELLRHSDENFMEILTNDVYGFQNFIKEENQVQSNKIQHQDIANLTTSPALKKGIWSTIKLVRELTSIFGEPEKIIMEFATEDQQKGKKQKSRKQLWDDNIKKNKLKSVDEYKYIIDVANKLNNEQLQQEKLWLYLSQNGKCMYSGQSIDLDALLSPNATKHYEVDHIFPRSFIKDDSIDNKVLVIKKMNQTKGDQVPLQFIQQPYERIAYWKSLNKAGLISDSKLHKLMKPEFTAMDKEGFIQRQLVETRQISVHVRDFLKEEYPNTKVIPMKAKMVSEFRKKFDIPKIRQMNDAHHAIDAYLNGVVYHGAQLAYPNVDLFDFNFKWEKVREKWKALGEFNTKQKSRELFFFKKLEKMEVSQGERLISKIKLDMNHFKINYSRKLANIPQQFYNQTAVSPKTAELKYESNKSNEVVYKGLTPYQTYVVAIKSVNKKGKEKMEYQMIDHYVFDFYKFQNGNEKELALYLAQRENKDEVLDAQIVYSLNKGDLLYINNHPCYFVSRKEVINAKQFELTVEQQLSLYNVMNNKETNVEKLLIEYDFIAEKVINEYHHYLNSKLKEKRVRTFFSESNQTHEDFIKALDELFKVVTASATRSDKIGSRKNSMTHRAFLGKGKDVKIAYTSISGLKTTKPKSLFKLAESRNEL

SEQ ID NO: 206 - protein, 1156 aa, Ruminococcus albus
MGNYYLGLDVGIGSIGWAVINIEKKRIEDFNVRIFKSGEIQEKNRNSRASQQCRRSRGLRRLYRRKSHRKLRLKNYLSIIGLTTSEKIDYYYETADNNVIQLRNKGLSEKLTPEEIAACLIHICNNRGYKDFYEVNVEDIEDPDERNEYKEEHDSIVLISNLMNEGGYCTPAEMICNCREFDEPNSVYRKFHNSAASKNHYLITRHMLVKEVDLILENQSKYYGILDDKTIAKIKDIIFAQRDFEIGPGKNERFRRFTGYLDSIGKCQFFKDQERGSRFTVIADIYAFVNVLSQYTYTNNRGESVFDTSFANDLINSALKNGSMDKRELKAIAKSYHIDISDKNSDTSLTKCFKYIKVVKPLFEKYGYDWDKLIENYTDTDNNVLNRIGIVLSQAQTPKRRREKLKALNIGLDDGLINELTKLKLSGTANVSYKYMQGSIEAFCEGDLYGKYQAKFNKEIPDIDENAKPQKLPPFKNEDDCEFFKNPVVFRSINETRKLINAIIDKYGYPAAVNIETADELNKTFEDRAIDTKRNNDNQKENDRIVKEIIECIKCDEVHARHLIEKYKLWEAQEGKCLYSGETITKEDMLRDKDKLFEVDHIVPYSLILDNTINNKALVYAEENQKKGQRTPLMYMNEAQAADYRVRVNTMFKSKKCSKKKYQYLMLPDLNDQELLGGWRSRNLNDTRYICKYLVNYLRKNLRFDRSYESSDEDDLKIRDHYRVFPVKSRFTSMFRRWWLNEKTWGRYDKAELKKLTYLDHAADAIIIANCRPEYVVLAGEKLKLNKMYHQAGKRITPEYEQSKKACIDNLYKLFRMDRRTAEKLLSGHGRLTPIIPNLSEEVDKRLWDKNIYEQFWKDDKDKKSCEELYRENVASLYKGDPKFASSLSMPVISLKPDHKYRGTITGEEAIRVKEIDGKLIKLKRKSISEITAESINSIYTDDKILIDSLKTIFEQADYKDVGDYLKKTNQHFFTTSSGKRVNKVTVIEKVPSRWLRKEIDDNNFSLLNDSSYYCIELYKDSKGDNNLQGIAMSDIVHDRKTKKLYLKPDFNYPDDYYTHVMYIFPGDYLRIKSTSKKSGEQLKFEGYFISVKNVNENSFRFISDNKPCAKDKRVSITKKDIVIKLAVDLMGKVQGENNGKGISCGEPLSLLKEKN

SEQ ID NO: 207 - protein, 1440 aa, Weeksella virosa
MKTILGLDLGTNSIGWALVEQDFENKQGLILGMGSRIIPMDAGIIGKFAEGSSISQTAERTGYRSIRRLRERHLLRRERLHRVLNILKFLPEHYAAEIDFEKRFGQFLAETEPKLAWKKNAEGKFEFLFQRSFDEMVADFKANGQDIKIPYDWTIYYLRKKALTQKISPQELAWIILNFNQKRGYYQLRGEEEEENPNKKVEFYSLKIVDVVADEQPNKKGDTWYSLHLENGWVYRRSSKIPLYDWKDKVRDFIVTTDINEDGSEKLDKDGEVKRSFRAPKEDDWTLIKKKTEQEIEQFNQTVGSYIYEALLDNPTQKIRGKLVRTIERKFYKSELKKILEKQIELQPELFTEDLYNACARELYRRNVAHQQQLSSRDFVYLFLNDIIFYQRPLRSQKSLISNCSLEFRTIKDKDGNGQIIYLKAIPKSNPYYQEFRVWQWLYNLKIFTKEDDKDVTNQFINKVEDLEALFEFLMNQKEVNHTDILTYLIEPIVKSKYPNAKGKAFKDELKKELKKYRWNYVYDADKDESKSYPMNETRYELRKRLDKVENVPADFMTRKIEQHLWHIIYSVTDKIEFEKALKSFANKYDLHQESFVENFKRFKPFDSDYGTYSEKAIKKLLPLMRVGKYWSWDIIDDKTKTRIGKIITGEYDETIKNRVREKAIDLTEENHFQGLQLWLAQYIVYDRHSEADIAGKWNSVADLEQYLSEFKQHSLRNPIVEQVITETLRVVRDIWKQYGKGAKDYFDEIHIELGREMKNTAEERKRLSSIISENETTNLRIRAILEELMYDENMENVRPYSPMQQEALKIYEDGVLSSSVEIPEDIEKISKKSEPTKSEIQRYKLWLEQKYRSPYTGRPIPLSKLFTPAYQIEHIIPQARFFDDGFSNKVICESEVNALKDKMLGLEFIQNYYGQKVTTSFGEVTILTEDAYKAFVKEHYDKNRSKRNKLLLEEIPEKMIDRQMNDTRYISKYISKVLSNLVRGEKDDEGVNSKNIIPGNGKITGILKQDWGLNDVWNDLILPRFERMNQLTNSTDFTAWNEKHQKFLPSVPLELSKGFQKKRIDHRHHALDALIIACATRDHVNLLNNKHAKSRNERYDLQHKLRHTTPWQDKEGKVRTKFTEFKKPWETFTQDTKKELEKIVVNFKQNLRVINKATNYYEKIVDGKKVMFKQEGVNWAIRKPMHKETVSGKIDLPRVKVSKGKILTATRKSLDTSFNAKTILSITDTGIQKILLNYLKAKGNPELAFSPEGIEEMNQNISLYNDGKPHQPILKVRVFEQGSKFPLGETGNKTTKYVEAAKGTNLFFGVYEDNQGKRSYDTIPLNIVIERQKQGLNSVPETNEKGHRLLFSLSPNDLVYVPIEGEVFDETNPDVNRIYKVVSFSGSQMFCVRQDVATSIVYKLEFSSLNKMERTIDGIMIKEICIKLKVDRLGNISKA

SEQ ID NO: 208 - protein, 1179 aa, Sphaerochaeta globus
MSKKVSRRYEEQAQEICQRLGSRPYSIGLDLGVGSIGVAVAAYDPIKKQPSDLVFVSSRIFIPSTGAAERRQKRGQRNSLRHRANRLKFLWKLLAERNLMLSYSEQDVPDPARLRFEDAVVRANPYELRLKGLNEQLTLSELGYALYHIANHRGSSSVRTFLDEEKSSDDKKLEEQQAMTEQLAKEKGISTFIEVLTAFNTNGLIGYRNSESVKSKGVPVPTRDIISNEIDVLLQTQKQFYQEILSDEYCDRIVSAILFENEKIVPEAGCCPYFPDEKKLPRCHFLNEERRLWEAINNARIKMPMQEGAAKRYQSASFSDEQRHILFHIARSGTDITPKLVQKEFPALKTSIIVLQGKEKAIQKIAGFRFRRLEEKSFWKRLSEEQKDDFFSAWTNTPDDKRLSKYLMKHLLLTENEVVDALKTVSLIGDYGPIGKTATQLLMKHLEDGLTYTEALERGMETGEFQELSVWEQQSLLPYYGQILTGSTQALMGKYWHSAFKEKRDSEGFFKPNTNSDEEKYGRIANPVVHQTLNELRKLMNELITILGAKPQEITVELARELKVGAEKREDIIKQQTKQEKEAVLAYSKYCEPNNLDKRYIERFRLLEDQAFVCPYCLEHISVADIAAGRADVDHIFPRDDTADNSYGNKVVAHRQCNDIKGKRTPYAAFSNTSAWGPIMHYLDETPGMWRKRRKFETNEEEYAKYLQSKGFVSRFESDNSYIAKAAKEYLRCLFNPNNVTAVGSLKGMETSILRKAWNLQGIDDLLGSRHWSKDADTSPTMRKNRDDNRHHGLDAIVALYCSRSLVQMINTMSEQGKRAVEIEAMIPIPGYASEPNLSFEAQRELFRKKILEFMDLHAFVSMKTDNDANGALLKDTVYSILGADTQGEDLVFVVKKKIKDIGVKIGDYEEVASAIRGRITDKQPKWYPMEMKDKIEQLQSKNEAALQKYKESLVQAAAVLEESNRKLIESGKKPIQLSEKTISKKALELVGGYYYLISNNKRTKTFVVKEPSNEVKGFAFDTGSNLCLDFYHDAQGKLCGEIIRKIQAMNPSYKPAYMKQGYSLYVRLYQGDVCELRASDLTEAESNLAKTTHVRLPNAKPGRTFVIIITFTEMGSGYQIYFSNLAKSKKGQDTSFTLTTIKNYDVRKVQLSSAGLVRYVSPLLVDKIEKDEVALCGE

SEQ ID NO: 209 - protein, 1370 aa, Streptococcus gallolyticus
MTKKNYSIGLDIGTNSVGWAVITDDYKVPAKKMKVLGNTDKKYIKKNLLGALLFDSGETAEATRLKRTARRRYTRRKNRLRYLQEIFAEEMTKVDESFFYRLDESFLTTDEKDFERHPIFGNKAEEDAYHQKFPTIYHLRNYLADSSEKADLRLVYLALAHMIKYRGHFLIEGKLNAENTDVQKLFTDFVGVYDRTFDDSHLSEITVDVASTLTEKISKSRRLENLIKYYPTEKKNTLFGNLIALALGLQPNFKMNFKLSEDAKLQFSKDTYEEDLEELLGKIGDDYADLFTSAKNLYDAILLSGILTVDDNSTKAPLSASMIKRYVEHHEDLEKLKEFIKANKSELYHDIFKDKNKNGYAGYIENGVKQDEFYKYLKNTLSKIDGSDYFLDKIEREDFLRKQRTFDNGSIPHQIHLQEMHAILRRQGDYYPFLKEKQDRIEKILTFRIPYYVGPLVRKDSRFAWAEYRSDEKITPWNFDKVIDKEKSAEKFITRMTLNDLYLPEEKVLPKHSHVYETYAVYNELTKIKYVNEQGKESFFDSNMKQEIFDHVFKENRKVTKEKLLNYLNKEFPEYRIKDLIGLDKENKSFNASLGTYHDLKKILDKAFLDDKVNEEVIEDIIKTLTLFEDKDMIHERLQKYSDIFTANQLKKLERRHYTGWGRLSYKLINGIRNKENNKTILDYLIDDGSANRNFMQLINDDTLPFKQIIQKSQVVGDVDDIEAVVHDLPGSPAIKKGILQSVKIVDELVKVMGDNPDNIVIEMARENQTTNRGRSQSQQRLKKLQSSLKELGSNILNEEKPSYIEDKVENSHLQNDQLFLYYIQNGKDMYTGDELDIDHLSDYDIDHIIPQAFIKDDSIDNRVLTSSAKNRGKSDDVPSLDIVRARKAEWVRLYKSGLISKRKFDNLTKAERGGLTEADKAGFIKRQLVETRQITKHVAQILDARFNTEHDENDKVIRDVKVITLKSNLVSQFRKDFEFYKVREINDYHHAHDAYLNAVVGTALLKKYPKLASEFVYGEYKKYDIRKFITNSSDKATAKYFFYSNLMNFFKTKVKYADGTVFERPIIETNADGEIAWNKQIDFEKVRKVLSYPQVNIVKKVETQTGGFSKESILPKGDSDKLIPRKTKKVYWDTKKYGGFDSPTVAYSVFVVADVEKGKAKKLKTVKELVGISIMERSFFEENPVEFLENKGYHNIREDKLIKLPKYSLFEFEGGRRRLLASASELQKGNEMVLPGYLVELLYHAHRADNFNSTEYLNYVSEHKKEFEKVLSCVEDFANLYVDVEKNLSKIRAVADSMDNFSIEEISNSFINLLTLTALGAPADFNFLGEKIPRKRYTSTKECLTATLIHQSITGLYETRIDLSKLGEE

SEQ ID NO: 210 - protein, 1044 aa, Nitrosomonas sp.
MLHKMRYRLALDLGSTSLGWAMVRLNANQQPCAVIKAGVRIFSNGRNPKDGSSLAVTRREARSMRRRRDRLLKRKARMMRTLIEYGFFPANETQRKALENLNPYALRAKGLDEALTPSEFARALFHINQRRGFKSNRKTDKKDSDSGALKTAIKQLHSVLDPQGNDGKPRTVGELLYKRFTDLSKLPKDRTVRARYRQDKIVKDDGKTKIDKYYDLYIDRAMIEQEFDALWKKQSELNPILFTENARADLKDVLLYQRSLKPVKPGRCTFMSEEERAPLALPSTQRFRMYQEVNNLRILREGLKEESLTLQQRDDLINALEKNNRRTFTQIKKLLGVGGSVQFNFEDPKREELKGNTTSAILGKSEHFGEAWFAFNEAKQDAIVLQLIKEENEAKLVRWLQDETGIDEKRAEVIANAGLPEGYGSLCIEALARILPELRRDVVTYDKAVQAAGFEHHSKLNRNEEIPDITFKIESIDRNSGEIKQFHLHKELPYYGEYLQRHVGFGSGKPEDSIEKRYGKIANPTVHIGLNQVRVVVNALIKRYGHPSEIIVEVARDLKQSKDRRDEENKRQAENQKRNERLRKDIADILGISEERVRRDDIEKMILWEELSFDPADRRCPYSGVQVSTVMLLSDEVEVEHILPFSQTLDDSLNNKTVALRQANRIKGNRTPWEAFGTSNISGFDYSGILTRAELMPKAKRYRFAEDGYQRWLKDDAGFLARALNDTRHLSKIAREYMSLICPNTRVIPGQMTAMLRRNFGLNDVLGLNGEKNRNDHRHHAVDACVIAVTDQGLLQRFAAASASARERQLNRLVENMPLPWESYREHVRRAIDGIWVSHRPDHSHEGAMHNDTAYGLRGNGRVSFHKMVEGKREYIEDNLKVIEITDTKAIDRHGLLPTGKPRPYKGYKGDSNYCIEIVRNEKGRWEGEIISTFDAYQLVRKYGIVQLRYPVLSVSGKPLVMRLIRNDFVRLEHEGITRTLRVCKMREDGQVALADVTEANVDARTRTKEICYVFKTGGSLQKAKARRITISPIGELRDPGFKE

SEQ ID NO: 211 - protein, 1045 aa, Acidovorax avenae
MQKEKPLAYRLALDLGSTSLGWAVLRLSAPGEPSAVIRAGSRIFSDGRNPKDGSSLAVTRRAARAMRRRRDRLLKRKARMLAALERHGFFPQDEAARKALEKLNPYGLRARGLESALKPEEFGRALFHLNQRRGFQSNRKTDRKDSDSGALKQAIGTLRAQMHESGCRTVGEWFWKVRMERKPEGVKGQGVRARYRETPFTTDEGKKRIDKRYDLYVDRAMVAQEFDALWAAQATFAPALFNEAARAELRDILLHQRKLRPVQPGRCTLVPEEPRALLALPSTQRFRIYQEVNHLRVLHDELREEALTLAQRDQIVALLERQAKVTFTAMRKALGFSALFNLEDAKRDGLKGNATTAALGKKDLFGPLWAGFDTALQDEIVTQLMTEESEPRLIAWLQEHTGVDEARAQAIANAGLPEGYGSLGRTALARIVPELQRDVITYDKAVQAAGFAHHSDLGFSFEHDADEVERIGERTIASTGEIKPVFAFKQLPYYGRALQRHVAFAKENPRNDEERYGKIANPTVHIGLNQVRVVVNALMCRYGRPTEVVIELARDLKQSREQKLEAQQRQADNQKRNARIRRSIAEVLGISEERVRTLDIQKWILWEELSHDAADRRCPYSGVQISASMLLGERVEIEHILPFSMTLDDSLNNRTVALREANRIKRNRTPWDARTDFEAHGWSYDGILQRAERMPQRKRHRFAPDGYERWLGEDKDFLARALNDTRYLSRVAAEYLRLVCPGSATRVIPGQMTALLRGKFGLNDVLGLDGEKNRNDHRHHAVDACVIGVTDQRMMQRFAQANAQAREDGLTRLVEDMPLPWPTYRAHVERAVRHIWVSHKPDHGFEGAMMEETSYGILRDGTIKQRRKADGSAGREISRLIRITEPSQPQRHGVDAEGRPLPYKGYVGGSNYCLEITVNDKGKWEGQVISTFDAYRIVREGGLRQLRHSTQGQNGQALAMRLVIGDSVRLEVDEQERVMRIVKINGNNGQVFMAPVHEANVDARNSDKNEAFAYTSKIAGSFQKTKARQVTISPIGELRDPGFKG

SEQ ID NO: 212 - protein, 1218 aa, Prevotella denticola
MKASEEKLSKGLSTYMKENNLLTVGAAFAQLEDEGVRIRNNNNYRAIRSQFQHEIETIFMFQQGLSENELYERLVSEKKNIGTIFYKRPLRSQRGNVGKCTLERTKPRCAIGHPLFEKFRAWTLINNIKIRMSEEEQAEQLPMKLRFELYNDCFLAFVRAEFKFEDIRKYLEKRLGVHFSYNDKTINYKDSTSVAGCPITARFRKLLGEDWESFHVDGQKQRQAHGKNNASFHTVSYSTNDIWHFCYDAEEPEAVLSFAQDNLKWEKKKAEELVRIWSAIPQGYAMLSQKAIRNINKMLILGLKYSDAVLLAKVPEIVEITDGEILSVTEDYHRVEAQVGYEKQINNIVNALIAKYKSASEEYRFADHNYEYQLDKSDEKDIIKQIESNIGTRKWSLLDADEQTDILQKVRDKYQNFFRSHERKFVESPKLGECFEEYLMKKFPMVEGEQWKKLYHPSQIAIYRPVSAGKDRSALRLGNPDIGAIKNPTVLRVLNTLRKRVNQLLDDGLISPDETRVVVETARELNDANRKWALDNYNRIRHDENEKIKKILEEFYPKRDGISTDDIDKARYVIDQREMDYFTEEKPYNKDIKKYKLWLEQGGQCMYTGRTINLSNLFDPNSFDVEHTIPESISFDSSDMNLTLCDAHYNRFIKKNHIPADLPNYDKSVVIDGKEYSPIKPRLQRWADRVERLNRNVEYWRGQARRAQNKDRKDQCMREMHLWKMELEYWTKKLERFTITEVTDEFKNSQLVDTRVITRHAVLYLKSIFPHVDVQRGDVTAKFRKILGIQSVDEKKDRSLHSHHAIDATTLTIIPGAAKRERMLELFAKIEEVNKMLSFSGNEDRTGLKQELDGLKNQLNKEVKACRIGHNVSEIGTFINDNIIINHHVKNQALTPVRRRLRKRGHIVGGMDNPRWQTGDALRGEIHKASYYGAITQFAKDKDGKVLLKEGHPLVDPTIKFVIRRELKYKKSTADSGFASWDDLEKAIVDKELFALMKGQFPEETSFKDACEQGIYMIKKGKNGEVDTKLYRIRHIRCKTKQKNALKIKEQAYKSEKEYKRYFYAAVGDLYAMCCYTNGKTREFKIYSLYDISCHRKVGVEDIPEFITDKKGNRLMLDYKLHTGDMILLYKENPEELYDLDNVSLSKLLYKINGFENDGLRIRMVNHLVAKEAMGESVKDYAKLPDIIRCGVKTIKFLVMGENRDFVIKNGKISFNHR

SEQ ID NO: 213 - protein, 1458 aa, Fluviicola taffensis
MTKTILGLDLGTNSIGWALINQDFDNKKGEILGMGSRIIPMTQDIKDEFGKGNSISQTAERTRLRGVRRLIHRTLLRRERLHRVLNIIGFLPEHYANQIDFEKRFGKFKPESEPKISFDGNDVFLFEKSYQEMLVDFKIHQPQLVSNGKKIPHDWTIYYLRKKALSKKIEKEELAWILLNFNQKRGYYQLRGEEEEETPNKLVEFHSLKIVEVNADEPQKGKPEIWYSLVLENGWVYRRASKTPLFDWKDKIREFIVTTEINNDGTVKTDKEGTEKRSFRAPKPEDWTLQKKKTEFELSKSGNEVGAFIYESILQKPNQKIRGKLISTIERKFYKEELKTILKTQLFFHKELKDEKLYNACIEELYKNNEAHRSLLSNKGFEHLFINDILFYQRPLRSKKSQISNCPLEKRTYKKEGIEITEGIKVISKSNPIYQEFRLWQWISNLSLYCIEPTETNVTSTFLNSIEDYENLFEFLNNRKEIEQKHLLKYLLENQGFKGKLLTNELEKFRWNFVADKKYPCNETGSLLHTRLSKVKNISPDFLTKEIEHQLWHIIYSVTDKIEYEQALKTFARKNNLDVDSFFEHFKKIPPFESTYGAYSEKAIKKLLPLIRLGKYWNWEAIDSISKDRISKILSGEYDENIKNRVREKAVHLTSENNFQGLQEWLAKYIVYDRHSEGNDLGKWTSVSDLETYLKEFKQHSLRNPIVEQVITETLRVVKDIWIKHGKGTENFFDEIHVELGREMKNNSEDRKRLTNTITENENTNLRIKALLMEMMNDNDVENVRPYSPSQQEILKIYEDGALNSNIELDDEIVKISKKAEPTKSELQRYKLWLEQKYRSPYTGQVIPLNKLFTSEYEIEHVVPQSRFFDDSFSNKVICESAVNKRKDNQLGLQFIKNHSGEKVELGFGKVVQVFTEEQYLDFVKEHYSKNRSKHNKLLLEEIPEKMIERQLNDTRYISKFVSSILSNIVRSEKDDDGLNSKNILPGNGKITTELKRDWGLNDVWNDLILPRFERMNTITNSDLFTTYNDKYQKHLPTVPFEYSKGFQKKRIDHRHHAMDALVIACATRDHLNLMNNQSAKSELKRYDLQNKLRKKEPYFNQKENKQKEAFKDFIKPWGTFTEDSKNALEKIIISFKQNLRVINKATNSYESYKDEDGNLRIGKDGKPEKGLIKQKGLNWAIRKPLHKDTVSGQINLSRIKLPNGKILTATRKNLDTSFDLKTIENSITDTGIQKILKNYLLSKESPELAFSPEGLEEMNNEIEKYNNGKFHHPINKARIYELGSKFNVGQTGNRRDKFVEAAKGTNLFFAIYQDENKNRSYETIPLNEVIEHQKWRASLPKEEQEKIPLVPVNKLKGTFIFSLSPNDLVYVPSNDELERSASIDFSKLKKEQINRLYKMVSSSGSQCFFVKSEVATSVVNKMEYSSLNKMEKSIDNLMVKEICIKLKIDRLGNISKA

SEQ ID NO: 214 - protein, 1384 aa, Coriobacterium glomerans
MKLRGIEDDYSIGLDMGTSSVGWAVTDERGTLAHFKRKPTWGSRLFREAQTAAVARMPRGQRRRYVRRRWRLDLLQKLFEQQMEQADPDFFIRLRQSRLLRDDRAEEHADYRWPLFNDCKFTERDYYQRFPTIYHVRSWLMETDEQADIRLIYLALHNIVKHRGNFLREGQSLSAKSARPDEALNHLRETLRVWSSERGFECSIADNGSILAMLTHPDLSPSDRRKKIAPLFDVKSDDAAADKKLGIALAGAVIGLKTEFKNIFGDFPCEDSSIYLSNDEAVDAVRSACPDDCAELFDRLCEVYSAYVLQGLLSYAPGQTISANMVEKYRRYGEDLALLKKLVKIYAPDQYRMFFSGATYPGTGIYDAAQARGYTKYNLGPKKSEYKPSESMQYDDFRKAVEKLFAKTDARADERYRMMMDRFDKQQFLRRLKTSDNGSIYHQLHLEELKAIVENQGRFYPFLKRDADKLVSLVSFRIPYYVGPLSTRNARTDQHGENRFAWSERKPGMQDEPIFPWNWESIIDRSKSAEKFILRMTGMCTYLQQEPVLPKSSLLYEEFCVLNELNGAHWSIDGDDEHRFDAADREGIIEELFRRKRTVSYGDVAGWMERERNQIGAHVCGGQGEKGFESKLGSYIFFCKDVFKVERLEQSDYPMIERIILWNTLFEDRKILSQRLKEEYGSRLSAEQIKTICKKRFTGWGRLSEKFLTGITVQVDEDSVSIMDVLREGCPVSGKRGRAMVMMEILRDEELGFQKKVDDFNRAFFAENAQALGVNELPGSPAVRRSLNQSIRIVDEIASIAGKAPANIFIEVTRDEDPKKKGRRTKRRYNDLKDALEAFKKEDPELWRELCETAPNDMDERLSLYFMQRGKCLYSGRAIDIHQLSNAGIYEVDHIIPRTYVKDDSLENKALVYREENQRKTDMLLIDPEIRRRMSGYWRMLHEAKLIGDKKFRNLLRSRIDDKALKGFIARQLVETGQMVKLVRSLLEARYPETNIISVKASISHDLRTAAELVKCREANDFHHAHDAFLACRVGLFIQKRHPCVYENPIGLSQVVRNYVRQQADIFKRCRTIPGSSGFIVNSFMTSGFDKETGEIFKDDWDAEAEVEGIRRSLNFRQCFISRMPFEDHGVFWDATIYSPRAKKTAALPLKQGLNPSRYGSFSREQFAYFFIYKARNPRKEQTLFEFAQVPVRLSAQIRQDENALERYARELAKDQGLEFIRIERSKILKNQLIEIDGDRLCITGKEEVRNACELAFAQDEMRVIRMLVSEKPVSRECVISLFNRILLHGDQASRRLSKQLKLALLSEAFSEASDNVQRNVVLGLIAIFNGSTNMVNLSDIGGSKFAGNVRIKYKKELASPKVNVHLIDQSVTGMFERRTKIGL

SEQ ID NO: 215 - protein, 1077 aa, Neisseria bacilliformis
MQQKPQRYILGLDLGIASVGWACVWADENEHPTGLLDCGVRTFERAEVPKTGDSLALARRQARSVRRLIRRRAHRLLRLRRLLKREGVLLSADFNENGLVRGLPIDAWALRVAGLDRKLSNKEWAAVLLHLVKHRGYLSQRKNETQSKDKELGRLLAGVNGNREALQNRSDEYRTAAELAVKKFAAENNGSLRNKGGDYSHTFDRKDLQRELHLLFERQRALDNPFTSSEMEAAVDELLMKQRSALQGEAVLKMLGRCTFEPSEYKAAKNTYSAERFVWLTKLNNLRIQYNGEERALSEAERRLLLDEPYQKAKLTYKQVRTILELPESAVFKGLRYGHGEDGLKAESGTLMEMKAYHAVRKALKDAGLEGEWENRIRNPELLDAIGTAFSLYKTDEDIRANLAAFRLSENVLEALLAGLNFDKFVHLSLKALAKILPLMEQGMRYDEACKEAYGDHYGAKEQEDHRLLPPFVADDIRNPVVFRTLTQARKIVNEIVRRYGSPLRVHIETGREVGKSFSDRKEIEKRQEENRKERERAAAHFKELFPNFAGEPKAQDILKLRLYEQQHGKCLYSGKEIDLRRLPEKGYVEIDHALPFSRTWDDSFNNKVLVLGKENQDKRNRTPYEYLDGKGNSGAWRAFAERVSGCRFPYAKKQRLLTQKLDEKTEQGFLERNLNDTRYVARFLCQFIEEKMHLEGAGKKRVFASNGQITALLRGFWGLKKVREENDRHHALDAVVVACSSVSMQQKITRHFRYREELEHIDRETGEVIHGFPQPWEFFRQEVMTRVFSDDPVSELAEKLDSRPEAVHEFVTPLFVSRAPHRKVTGQGHLETIRSAKRLDEKISVVKLPLTQLKTKDIERIVGYPNREPALYDALAARLAAFKDDPAKAFSEPFYKTGKDGKCGVLVKAVRVENVQKSGLLVRKDESGKMQGVADNATMVRVDVFGKNGKNYLVPVYAWQVEKGELPNRAVVAYADEEDWDEMDDSFEFKFSLYPNDLVEVVTKKDKFFGYYSGFNRATGAINIKEHDLSKSKVKNGVYEGIGVKTAQSFQKYQVDTLGKTIRLCKPEKRMGFKKK

SEQ ID NO: 216 - protein, 1029 aa, Alicycliphilus denitrificans; identical to SEQ ID NO: 193

SEQ ID NO: 217 - protein, 1122 aa, Streptococcus suis; identical to SEQ ID NO: 87

SEQ ID NO: 218 - protein, 1428 aa, Parasutterella excrementihominis
MGKTHIIGVGLDLGGTYTGTFITSHPSDEAEHRDHSSAFTVVNSEKLSFSSKSRTAVRHRVRSYKGFDLRRRLLLLVAEYQLLQKKQTLAPEERENLRIALSGYLKRRGYARTEAETDTSVLESLDPSVFSSAPSFTNFFNDSEPLNIQWEAIANSPETTKALNKELSGQKEADFKKYIKTSFPEYSAKEILANYVEGRRAILDASKYIANLQSLGHKHRSKYLSDILQDMKRDSRITRLSEAFGSTDNLWRIIGNISNLQERAVRWYFNDAKFEQGQEQLDAVKLKNVLVRALKYLRSDDKEWSASQKQIIQSLEQSGDVLDVLAGLDPDRTIPPYEDQNNRRPPEDQTLYLNPKALSSEYGEKWKSWANKFAGAYPLLTEDLTEILKNTDRKSRIKIRSDVLPDSDYRLAYILQRAFDRSIALDECSIRRTAEDFENGVVIKNEKLEDVLSGHQLEEFLEFANRYYQETAKAKNGLWFPENALLERADLHPPMKNKILNVIVGQALGVSPAEGTDFIEEIWNSKVKGRSTVRSICNAIENERKTYGPYFSEDYKFVKTALKEGKTEKELSKKFAAVIKVLKMVSEVVPFIGKELRLSDEAQSKFDNLYSLAQLYNLIETERNGFSKVSLAAHLENAWRMTMTDGSAQCCRLPADCVRPFDGFIRKAIDRNSWEVAKRIAEEVKKSVDFTNGTVKIPVAIEANSFNFTASLTDLKYIQLKEQKLKKKLEDIQRNEENQEKRWLSKEERIRADSHGICAYTGRPLDDVGEIDHIIPRSLTLKKSESIYNSEVNLIFVSAQGNQEKKNNIYLLSNLAKNYLAAVFGTSDLSQITNEIESTVLQLKAAGRLGYFDLLSEKERACARHALFLNSDSEARRAVIDVLGSRRKASVNGTQAWFVRSIFSKVRQALAAWTQETGNELIFDAISVPAADSSEMRKRFAEYRPEFRKPKVQPVASHSIDAMCIYLAACSDPFKTKRMGSQLAIYEPINFDNLFTGSCQVIQNTPRNFSDKTNIANSPIFKETIYAERFLDIIVSRGEIFIGYPSNMPFEEKPNRISIGGKDPFSILSVLGAYLDKAPSSEKEKLTIYRVVKNKAFELFSKVAGSKFTAEEDKAAKILEALHFVTVKQDVAATVSDLIKSKKELSKDSIENLAKQKGCLKKVEYSSKEFKFKGSLIIPAAVEWGKVLWNVFKENTAEELKDENALRKALEAAWPSSFGTRNLHSKAKRVFSLPVVATQSGAVRIRRKTAFGDFVYQSQDTNNLYSSFPVKNGKLDWSSPIIHPALQNRNLTAYGYRFVDHDRSISMSEFREVYNKDDLMRIELAQGTSSRRYLRVEMPGEKFLAWFGENSISLGSSFKFSVSEVFDNKIYTENAEFTKFLPKPREDNKHNGTIFFELVGPRVIFNYIVGGAASSLKEIFSEAGKERS

SEQ ID NO: 219 - protein, 1371 aa, Lactobacillus buchneri
MKVNNYHIGLDIGTSSIGWVAIGEDGKPLRIKGKTAIGARLFQEGNPAADRRMFRTTRRRLSRRKWRLKLLEEIFDPYITPVDSTFFARLKQSNLSPKDSRKEFKGSMLFPDLTDMQYHKDYPTIYHLRHALMTQDEKFDIRMVYLAIHHIVKYRGNFLNSTPVDSFKASKVNFVDQFKKLNELYTAINPEESFQINLANSEDIGHQFLDPSIRKFDKKKQIPKIVPVSVDDKATDKINGKIASEIINAILGYKSKLDVVVQCTPVDSKSWALKFDEEDIDAKLQKILPEMDENQQSIIAILQNLYSQVTLNQIVPNGMSLSESMIEKYNDHHDHLKLYKKIIDQLADPKKKAALKKAYSQYVGDDGKVIEQADFWSSVKKNLDDSDLSKQIMDLIDAEKFMPKQRTSQNGVIPHQLHQRELDEIIEHQSKYYPWLAEINPNKHDLHLAKYKIEELVAFRVPYYVGPMITPDDQAKSAETVFSWMERKGKEAGQITPWNFDEKVDRNASANRFIKRMTTKDTYLIGEDVLPDESLLYEKFKVLNELNMVRVNGKLLKVADKQAIFQDLFENYKHISVKKLQNYIKSKTGLPSDPEISGLSDPEYFNNSLGTYNDFKKLFGNKVDEPDLQDDFEKIVEWSTVFEDKRILREKLNEITWLSDQQKDVLESSRYQGWGRLSKKLLTGIVNDQGERIIDELWNTNKNFMQIQSDNDFAKRIHEANADQMKAVDVEDVLADAYTSPQNKKAIRQVVKVVDDIQKAMGGVAPKYISIEFTRSEDRNPRRTISRQRQLENTLKDTAKSLAKSINPELLSELDNAAKSKKGLTDRLYLYFTQLGKDIYTGKPINIDEISTYDIDHILPQAFVKDDSLNNRVLVSKAINNGKSDNVPVQLFGAKMGHFWKQLAEAGLISKRKLKNLQTDPDTISKYAMHGFIRRQLVETSQVIKLVANILGDKYRNDNTKIIEITARMNHQMRDEFGFIKNREINDYHHAFDAYLTAFLGRYLYHRYIKLRPYFVYGDFKKFKEDKVTMRNFNFLHDLTDDTQEKIADAETGEVIWDRENSIQQLKDVYHYKFMLISHEVYTLRGAMFNQTVYPASDAGKRKLIPIKADRPINVYGGYSGSADAYMAIVRIHNKKGDKYRVVGVPMRARDRLDAAKKVSDADCDRALKDVLTPQLTKTKKSRKTGEITQVVEDFEIVLGKVMYRQLMIDGDKKFMLGSSTYQYNAKQLVLSDQSVKTLASKGRLDPLQESMDYNNVYTEILDKVNQYFSLYDMNKFRHKLNLGFSKFISFPNHNVFDGNTKASSGKREILEEVLNGLHANPTFGNLKDIGITTPFGQLQQPNGILLSDEAKIRYQSPTGLFERTVSLKDL

SEQ ID NO: 220 - protein, 1090 aa, Sphingomonas sp.
MDWRLGLDLGANSLGWAALRLDRAGDPIGILAMGSRIFSDGRDPKSGASLAVDRRAARAMRRRRDRFKQRQAALLKYLIRDGLFPADQADRQRLADEDPYALRARALDEELSLFEIGRALFHLNQRRGFQSNRKADRGQDDEAGKIAVGVDRLNQQMEEQGARTLGEFLHQRRRAATDANHIPSVRTRLRPETGEGAKGDGYDFYPSRALIAEEFEEIWAAQAPHYPDTLTQQVHDRLYEIIFHQRPLRAPQVGQCTLVAGETRLPKAHPLFQKRRLLEEINALMIVRPGEIAQRLTPEERDTLYLKLKDKRTVSFATLRKTLKLDSAARFNKESENRTELKGDEVAAELGAKTRLGTRWQHLSGDQQWEVVHRLMALESQADEAAFRDWISQTYDLLPEQAAAVLGARLPQGHGRFGPTATTTLIDSLLHDRTEDGRVVVYSEAVQRSGLGHHSDLRHDRDDEDVTELPYYGVALERHIMPGTAEPTDPEEMRIGRLTNPTVHIGLNQLRHVVNRLIRAYGPPKEIAIELARELKLSEDEKKKRNSENRDNRLAAEGRSKKLEEIRQRDTGANRALLKLWEELNPGNVLDRRCIYTGEQISIDMLFSDRVEVDHILPFAQTLDDSNGNKLLCLREANREKRRRSPYEAWGHTDRWPDIAERASRLPKPKRWRFEPDAMQRFATEDGFLARHLVDTQYLGRLAREYLSWLYPGRGEGSGHVWVSPGRLTEMVRRKLGLNDLLPDHNFGGGADQPKNRLDHRHHAIDALVVAIVDRGMLQAIARASGQDGSEGRERIHIPAPWDGFRDDLRVAVNGIIVSHRPDHGTVAKAGLARGRDQTAGRLHNDTAYGLTGETDAKGNSIVVRRIPLSAIKKPADIARVRDPLLRNALAEFTKGLDGKAFEARIGRFHELGPLLYRGIRRVRVVETLTVIPIRDAEGRAYKGYKGDSNYRYDVWEMPDGKWRCQVVSMFDAHQSTEQARPHPAARKILSLQRNDILAIERTEGDRELVRVVKFSEKQFAVAPPHEGGSLKTRDGNADDPFRYLYPSPNTLKGWRARQVRIDELGRVLDPGFPARKSVRRTRPRAAPVD

SEQ ID NO: 221 - protein, 1000 aa, Kingella kingae
MARAQRRLISRRANRMNKLRRLLKQENVLQANDYDEKGLIIGLPNQAWELRAQGLDRKLEPKEWAAVLINLVKHRGYLSQRKNESQTADKELGALLSGMNHNHQLLQSQSNQYRTPAELAIKQFATQDGHIRNQRGAYTHTFNRLDLQNELNQLFDAQTRLGNPHVSGSLKTAINDLLMNQKAALSGDAILEMLGRCTFEPSEYKAAKNTYSAERFVWLGKLTNLRIQDNGLESALSREQRELLLNEPYNKTKLTYQQVRKLLRLPETAFFKGLRYGKDNAESATFMEMKSYHAIRKSLENKSLKSEWEKLKTQPKLLDLIGTAFSIYKTDDEIAGCLKNQLPENVIIALQEQLNFSNFMELSLKALEKLLPLMEQGLRYDEACTQIYGNRHEKIADKTEKFLPNIPADKLRNPVVLRTLTQARKVINAIIRRYGSPARVHIETGREVGKSFSDRDKLKKQQEENQEQRRRAIDEWKQFFPNAAHEPKAVDILKLRLYQLQQGKCLYSGLPIDVRRLPEKGYVEIDHALPFSRTWDDSFNNKILVLASENQNKGNQTPYEYLRGADNSESWRLFVENVQNCQFSPNKKQKIMAKQLDEKGFLERNLNDTRYVSRFLCQFISEHLHLTGKGKKRVFASNGQITALLRGRWGLSKNREENDRHHAVDAVVVACSTVAMQQKITQFVRYQKGNVFTGERIDKETGEVISIHFPTPWEHFREEVMIRVFDDNPLRTLPEKLPNRPEALHEYVMPLFVSRMPTRKMTGQGHKETIKSAKRLDEKISVLRVPLTQLKLNDLENMVNREREPALYEALKARLEQFKNDPAKAFAEPFFKQGGQQVKAVRVEIVQKSGMLLRKINGVADNGSMVRVDVFEKSGKFYLVPIYAWQVAEGILPNYAVVAHKDESDWILMDESYHFKFALYKNDLLEVQTKKGGIMGYFASLDRATGAITIREHDRDKKKCKDGEHRSIGVKMASSFKKLQVDELGKNIHETRSRKRPNIG

SEQ ID NO: 222 - protein, 1130 aa, Streptococcus pasteurianus
MTNGKILGLDIGIASVGVGIIEAKTGKVVHANSRLFSAANAENNAERRGFRGSRRLNRRKKHRVKRVRDLFEKYGIVTDFRNLNLNPYELRVKGLTEQLKNEELFAALRTISKRRGISYLDDAEDDSTGSTDYAKSIDENRRLLKNKTPGQIQLERLEKYGQLRGNFTVYDENGEAHRLINVFSTSDYEKEARKILETQADYNKKITAEFIDDYVEILTQKRKYYHGPGNEKSRTDYGRFRTDGTTLENIFGILIGKCNFYPDEYRASKASYTAQEYNFLNDLNNLKVSTETGKLSTEQKESLVEFAKNTATLGPAKLLKEIAKILDCKVDEIKGYREDDKGKPDLHTFEPYRKLKFNLESINIDDLSREVIDKLADILTLNTEREGIEDAIKRNLPNQFTEEQISEIIKVRKSQSTAFNKGWHSFSAKLMNELIPELYATSDEQMTILTRLEKFKVNKKSSKNTKTIDEKEVTDEIYNPVVAKSVRQTIKIINAAVKKYGDFDKIVIEMPRDKNADDEKKFIDKRNKENKKEKDDALKRAAYLYNSSDKLPDEVFHGNKQLETKIRLWYQQGERCLYSGKPISIQELVHNSNNFEIDHILPLSLSFDDSLANKVLVYAWTNQEKGQKTPYQVIDSMDAAWSFREMKDYVLKQKGLGKKKRDYLLTTENIDKIEVKKKFIERNLVDTRYASRVVLNSLQSALRELGKDTKVSVVRGQFTSQLRRKWKIDKSRETYHHHAVDALIIAASSQLKLWEKQDNPMFVDYGKNQVVDKQTGEILSVSDDEYKELVFQPPYQGFVNTISSKGFEDEILFSYQVDSKYNRKVSDATIYSTRKAKIGKDKKEETYVLGKIKDIYSQNGFDTFIKKYNKDKTQFLMYQKDSLTWENVIEVILRDYPTTKKSEDGKNDVKCNPFEEYRRENGLICKYSKKGKGTPIKSLKYYDKKLGNCIDITPEESRNKVILQSINPWRADVYFNPETLKYELMGLKYSDLSFEKGTGNYHISQEKYDAIKEKEGIGKKSEFKFTLYRNDLILIKDIASGEQEIYRFLSRTMPNVNHYVELKPYDKEKFDNVQELVEALGEADKVGRCIKGLNKPNISIYKVRTDVLGNKYFVKKKGDKPKLDFKNNKK

SEQ ID NO: 223 - protein, 1119 aa, Lactobacillus coryniformis
MGYRIGLDVGITSTGYAVLKTDKNGLPYKILTLDSVIYPRAENPQTGASLAEPRRIKRGLRRRTRRTKFRKQRTQQLFIHSGLLSKPEIEQILATPQAKYSVYELRVAGLDRRLTNSELFRVLYFFIGHRGFKSNRKAELNPENEADKKQMGQLLNSIEEIRKAIAEKGYRTVGELYLKDPKYNDHKRNKGYIDGYLSTPNRQMLVDEIKQILDKQRELGNEKLTDEFYATYLLGDENRAGIFQAQRDFDEGPGAGPYAGDQIKKMVGKDIFEPTEDRAAKATYTFQYFNLLQKMTSLNYQNTTGDTWHTLNGLDRQAIIDAVFAKAEKPTKTYKPTDFGELRKLLKLPDDARFNLVNYGSLQTQKEIETVEKKTRFVDFKAYHDLVKVLPEEMWQSRQLLDHIGTALTLYSSDKRRRRYFAEELNLPAELIEKLLPLNFSKFGHLSIKSMQNIIPYLEMGQVYSEATTNTGYDFRKKQISKDTIREEITNPVVRRAVTKTIKIVEQIIRRYGKPDGINIELARELGRNFKERGDIQKRQDKNRQTNDKIAAELTELGIPVNGQNIIRYKLHKEQNGVDPYTGDQIPFERAFSEGYEVDHIIPYSISWDDSYTNKVLTSAKCNREKGNRIPMVYLANNEQRLNALTNIADNIIRNSRKRQKLLKQKLSDEELKDWKQRNINDTRFITRVLYNYFRQAIEFNPELEKKQRVLPLNGEVTSKIRSRWGFLKVREDGDLHHAIDATVIAAITPKFIQQVTKYSQHQEVKNNQALWHDAEIKDAEYAAEAQRMDADLFNKIFNGFPLPWPEFLDELLARISDNPVEMMKSRSWNTYTPIEIAKLKPVFVVRLANHKISGPAHLDTIRSAKLFDEKGIVLSRVSITKLKINKKGQVATGDGIYDPENSNNGDKVVYSAIRQALEAHNGSGELAFPDGYLEYVDHGTKKLVRKVRVAKKVSLPVRLKNKAAADNGSMVRIDVFNTGKKFVFVPIYIKDTVEQVLPNKAIARGKSLWYQITESDQFCFSLYPGDMVHIESKTGIKPKYSNKENNTSVVPIKNFYGYFDGADIATASILVRAHDSSYTARSIGIAGLLKFEKYQVDYFGRYHKVHEKKRQLFVKRDE

SEQ ID NO: 224 - protein, 1126 aa, Lactobacillus farciminis
MADRISLGLDIGVASVGFSVLDIDKGKVIELGARLFSATVAAGNQDRRDMRGARRLLNRNKQRRQDTGKLFKKFGLIDDFDKGSFYDNFNQNLNPYELRVKGLTEQLTKEELAESLYQIVKHRGISYALKDADVDEGGTDYSVSLKINSQELAEKTPAQIQLQRLNDYGKVRGQVVIGDDPDNQKVLLNVFPTSAYEKEAKQIIATQQQFYPESLTDKFTEEYCQILTRKRDYFVGPGNEKSRTDYGIYKTDGRTLDNLFEELIGHDKIYPEELRASAASYTAQLFNVLNDLNNLRILNYEDGKLTKEDKEKIIAEIKNNTTTINMLNVIKKVAGCSKDDIKGFRVNEKDKPEISSMPVYRKIHKDLLKAGVDISDWPVEFIDELSFILTLNTENGEIRKQLNNRLAPKFDFLNADLIQLIIDNKDSFEIKTNNKWHRFSVKTMNKLIPEMMERPVEQMTLLNEMGLVKKDKKRFENNKYLPYKEIAKDIFNPVASKSVREALKIVNAVLKKYGHIDYLVVEMPRDKNLKEEQDNIKEFQNKNKKAKDAAFEAFVKSVGSEQRVKEALSKNRKLQMKMRLWYQQQEIDPYNGKTIDATDLINNPDKFEIDHIIPQSISFYDSINNKTLCFASMNQVKGQKTPYEFMLEGHGQSYDKFKATVMANKNFGKAKRANYLFEENVSDIETRKRFLSRNLVDTRYSSRVVLNSLQDFFREKSADTKVTVIRGKFTSNMRKHWHIDKTRETFHHHAIDASIIAATPFLRMWKKGGTIFPVKVGEESIDIETGEILDDKNFDKAMYEEPYSGFVSEIMNADDRIKFSHQVDKKMNRKVSDATIYSTRTGKLAKDKKDAEYIVAKVKDIYSVDGFKKFKKVYDKDKTKFLLYKYDPRTFSKLERIISDCPDKVEKVQTNGKVKAVDISPFEMYRRDHGMIKKYSKKGNGPAIKQLKYLDKKLGSHIDITPANANGKHVILQSLKPWRTDVYLNHETGEYEIMGIKYSDLKFNKNEGYGIKKDKYLEIKKVEEVSEKSEFMFSLYRKDRVKVQDMKTGESVELLFWSRNFSNKKYAELKPISQAENDKKLPVYGKGRLIKRLIPKNCKIWKVNTTILGDPYYLEKESDSPKDILD

SEQ ID NO: 225 - protein, 1380 aa, Eggerthella sp.
MNLRHVGNYNIGLDMGTASVGWAAIDEQGELLHFKGKPTWGSRLFDSANTAATARMPRGQRRRYIRRRWRLDLLQKFFSEEMAEKDPEFFIRLRQSSLWPEDREGGHTAYHWPLFNDSDFNEKEYYEKFPTIFHLRQWLMETDEKADIRLIYLAFHNIVKHRGNFLQENNDSLSAQNANMRESLESFCIALEEWCDEKELTCSCDPQKLEHLFKEVKYRSDIRDGFAALLGLACSGENEVDVKAMAKEMGKAIVGYKADFSKIFTECDKEGSSFRLSDDEGPEAFLDICPDDGIALFEAIQMVYSSFILTGMLTEKGLSLSKISAYNQYGQDLESLKALVKEYVPNEYSSFFRGPTYSGSTEYDPSKAQGYTRYNLGPSKKGSGAKPMAYEDFKKSVEQLFANTNAINDERYKEMMGRFAEEKFLRRLRTSDNGRIPFQLNLEEMTAIIINQGKYYPFLLEQQEKLESLVRFRIPYYVGPLTRINARLDSKGNACFAWSKRKDGMDSASIKPWNWDEVIDKHASAQAFIERMTGTCTYLRGEPVLPRCSLLYEEYCVLNELNGARWTQDGDKFIRFDYKDRSDIIEELFKKRRGRIQYAAVADWMKQERSHANVHVSGGQGENAFESRLSSYHFFCNDVFGVDELPGSYVDMVEEIILWSTLFEDRSILREEIQRKYGDVLNEEQIKTICKKRFSGWGRLSRKLLCSLKAQTDNGPKSIMDILQEGDQNNGRVGRAMVFQEILHDEQLGFEQKIEEENTQSMLEGENLLIEDLPGSPAIRRSINQAVRIVDEIVGIAGHAPDNIFIEVTREDDTKKKGKRTTTRYSNIQKALEALKEEGAEALRELKTYKHNELDKRLSLYFMQNGKSLYSGIPLDIRRLSEYQIDHIIPQSYIKDDSYENMALVLPGENQSKADNLLISQDIRIKMKATWTALHKAGLMGDKKYNNLMNSSISDAKMKGFINRQLVETSQSVKLTQMMLSQKYPGAKVRPIKASISSQLRDACDLVKCREANDYHHAHDAYLACQVGRFVLKRHSSMFDNPIGMTKVIRDFVKRQGQEFKRNGKLPAYASRSGFIVQSFMRSGFDAETGELLRDDWNAPFEIARIKRCLNYRDCYISRMPMEDSGAFWDATIYSPKAGKKGALPVKQGLPVEKYGSYSREQFAYFFVYKAYNPKKKAYRLEFEAVPVRVASAVETRENALEEYAKSVAKQAGLEFVEVARPKVYKYQLIELGEDRLYITGKREVRNASQLAFSLDEIDLLKRLAEGEETSSEERERLFDVLIEKYARYAPRLARQLSVDSMSATFETLNAEEQLGILLSLVEIANGKRNMIDLSSAGGSKNAGCMNPTFSSELSSPGSNFTFIDQSVTGMFERRQRLEL

SEQ ID NO: 226 - protein, 1430 aa, Capnocytophaga canimorsus
MKHILGLDLGTNSIGWAVVKEAQNDNEQSEIVDVGVRVNPLTTDEKTNFEKGKPISTNADRTLKRSARRNLQRYKLRRKELIELLKEHQLISTDTILTENGKGTTFQTLELRAKSAKEKISLEELARVFLTINKKRGYKSSRKAKNEDEGQLIDGMEIAKRLYEENLTTGQLSLQLLKEGKKSLPDYYRSDLQFELDKVWNFQKQFHSHILTDEFYAQLKGKGQRATSALFLAKYQIYTAENKGSREDKKLQAYQWRVDALSKELTREQLAFVITEINNNLNNSSGYLGAISDRSKELYFNNETVGEYLWKQIAANPHTSLKNQVFYRQDYLDEFEQIWKTQSAFYPEILTDELKKELRDVVIFYQRKLKSQKSLVSFCEFENKEIEIKKEDGTSTKKVIGLKVAPKSSPLFQEFKIWQNLNNVLIRKKGSKTKKVDKNQQAVLFEEEKTIFELDLEAKQALFNELNLKGNLKAYYCLEILGYSPKEWEMNYSVLEGNRTNKALYEAYLKITDLEGYDAKNHLKVKLNKDEVELDDLKVPASEIKDMVQAIFKEAGINTDILHFNAELDGKDFENQASYQLWHLLYSYEGDDSKSGNELLYKLLETKFGFKKEYAQILANVSLSDDYGSLSTKAMRKIHPYIKENKFSTACELAGYRHSKHSLTKEENDNRVLKDSLEVLKKNSLRQPVVEKILNQMINLVNALLKKYRTENPNFKFDEIRIELARELKKNAEERANMTVNINKAKTEHEKIIKILKNEFGLPNPTRNDIIRYRLYEELKANGYKDLYTNEYIEKQDLFTKNIDIEHIIPKSRVFDDSFSNKTLSFRKTNLDKGERTAFDYIESKFGADKLEEYVARVEDLYKNNIISKAKYQKLLKKESEIGDGFVERDLRETQYIAKKAKEILLQITPNVLSTSGGITDRLREDWDLINVMKELNLPKYRALGLTQMEDRKYGQQVEVIIDWTKRNDHRHHAMDALTVAFTKHNHIQYLNYLNARKNEKHREHSNIMGIQQLETIKVTDKNGNEKRVFKAPMPNFRQVTKAFLENVLISHKAKNKVVTKNKNKVAGSNKVQEVLTPRGQLHKETVYGKYQYYVQKEEKIGGKFDLETIKKVANPLYQSLLKKRLEENGGDPKKAFTGKNSLAKNPIYLDDAQTEQLPEKVKLVWLENSFSIRKDITPENFKDEKLIDKILDEGVKRILKERLQSFGNDAKKAFSDLDKNPIWLNKEKGIAIKRVAISGVANAEPLHTKKDHLGKEILDKEGKSIPVDFISTGNNHHVAVYRDEKGNLQEKVVSVFEAVVRANQGLPIIDKTYNQHLGWEFLFTMKQNEMFVFSNESTGFNPNDIDLLDPKNKKIISPNLFRVQKFSKLQYGNSFVREFVFRHHLETTVEDRKELQGITYKQMKNSAFFNDIIKVRINHLGGIVSVGEY

SEQ ID NO: 227 - protein, 1348 aa, Finegoldia magna
MKSEKKYYIGLDVGTNSVGWAVTDEFYNILRAKGKDLWGVRLFEKAKTAADTRTFRSGRRRNDRKGVRLQILREIFEDEIKKVDKDFYDRLDESKFWAEDKKVSGKYSLFNDKNFSDKQYFEKFPTIFHLRKYLMEEHGKVDIRYYFLAINQMMKRRGHFLIDGQISHVTDDKPLKQQLILLINDLLKIELEEEFMDSIFEILADVNEKKTEKKNILKELINAQDFNKQEGKILYSIFESIVTGKAKIKNIISDEDILEKIKEDNKEDFVLTGDSYEENLQYFEEVLQENITLFNTLKSAYDFVILQSILKGKSTLSDAQVERYDEHKKDLEILKKVIKKYDEDGKLFKQVFKEDNGNGYVSYIGYYLNKNKKITAKKKISNIEFTKYVKGILEKQCDCEDEDVKYLLGKIEQENFLLKQISSINSVIPHQIHLFELDKILENLAKYYPSFNNKKEEFTKIEKIRKTFTFRIPYYVGPLNDYHKNNGGNAWIFRNKGEKIRPWNFEKIVDLHKSEEEFIKRMLNQCTYLPEETVLPKSSILYSEYMVLNELNNLRINGKPIDTDVKLKLIEELFKKKTKVTLKSIRDYMIRNNFADKEDFDNSEKNLEIVSNMKSYIDFNNILGDKFELEMVEDLIEKITIHTGNKKLLKKYIEETYPDLSSSQIQKIINLKYKDWGRLSRKLLDGITGTNIETGEIDTVINFLRNSSDNLMQIIGSQNYSFNNDIDKLRKKYIPQEISYEVVENLYVSPSVKKMIWQVIRITEEITKVMGYDPDKIFIEMAKSEEGKKTTISRKNKLLALYKAIKKDERDSQYEKLLTGLNKLDDSDLRSRKLYLYYTQMGRDMYTGEKIDLDKLFDSTHYDKDHIIPQSMKKDDSIINNLVLVNKNANQTTKGNIYPVPSSIRNNPKIYNYWKYLMEKEFISKEKYNRLIRNTPLTNEELGGFINRQLVETRQSTKAIKELFEKFYKKSKIIPVKAILASDLRKDMNTLKSREVNDLHHAHDAFLNIVAGDVWNREFTSNPINYVKENREGDKVKYSLSKYFTRPRKSKGKVIWTPEKGRKLIVDTLNKPSVLISNESHVKKGELFNATIAGKKDYKKGKIYLPLKKDDRLQDVSKYGGYKAINGAFFFLVEHTKSKKRIRSIELFPLHLLSKFYEDKNTVLDYAINVLQLQDPKIIIDKINYRTEIIIDNFSYLISTKSNDGSITVKPNEQMYWRVDEISNLKKIENKYKKDAILTEEDRKIMESYIDKIYQQFKAGKYKNRRTTDTIIEKYEIIDLDTLDNKQLYQLLVAFISLSYKTSNNAVDFTVIGLGTECGKPRITNLPDNTYLVYKSITGIYEKRIRIK

SEQ ID NO: 228 - protein, 1352 aa, Megasphaera sp.
MKKRNREEYYVGLDIGTSSVGWAVATPDYRIPKFRGHKMWGSRLFAEGKRAAERRQFRTNRRRLARRRDRLQILEELFAEEMAKVDNTFFMRLKESKFFLEDKTVKEKHILFSTDKFDADRFYKDNPTIYHVRKRLMEEEPQDIRELFLAVHHILKYRGHFLFAGSLEQNGASIEELVRTLLGKQGLAILDDTIDSNEMVNILKNTGETKSDRKKDVQELWNPLKDKVKKAQAAEMAGLVLGLKSDISKLFANSDYKDLDSSIKNINFSSGDYEEKRDDYANSIGDDIVLLDTMKALYDTLILSQILQGKRSISAAKVEDYNTHKEQLRALKAILKPHKRLYNEMFRENNKKDLSNYVAYISSYSEGKRVNREGFYKYVQAVLKQVDDSDSKQAILEAIRLETFLPLLRVKDNAVIPHQIHQAELEAILETARKKYNFLNDVSDGVSVKDKIIQLFTFRIPYYVGPLNPHSGETVADRKQGTGWVVRKQRGKVYPWNFADMVDVKASAEAFITNLTNKCTYLIGEDVLPKRSLLYSEFMLLNELNMIKYDGHELPVAIKQLYIEQVFKQEHKKQTKGRVLDFLKRNGLITGSATAVITGMDDAIKGDLQSYRDMVRIFGAGFDHSMAERIIRWVTLFGEAKDILENKIREVYGNSISDSQMRAIKKLKYADWGRLSQAFLIAVKGCDKSGVERNIITCLRASSQNLMEILSDQGTYIKQIKAWNHQHTTNMMDTLDYQLVDDLYVAPSVKRSIWQSLCIVEELVKIMGQAPKKIFVEVTRTKQAEKTKKDSRKKRLVELYTAIGKEGAAWKKEIEAHQAGDFRRKKLYLYYTQMGRCMYSNEPIAMDALFTSAYDIDHIYPQSLTKDGSWDNLVLVKSQLNKEKSDQYPLRPAIREKNKAHWQYLCRAGFISEKKYERLMRTTELTAEELSGFIARQLVETSQATKAVTGLLERIYTNTEICFVKAETVSQFRHQHNFIKIRELNNYHHAKDAYLNIVVGNVYHEKFTKNPWEFIARSTERRPYNLNRMYDFDLLKQGRVIWQVPKSLETVQAMMKSNDVRITKKLLVQKGELYDATITKAHKAKEGTYFPLKGADARLRDVHRYGGYEKIKIAYYSVFSCREKASNTIHTLIIPIPVYKAGLLQTEADLTAYAWQTKQKTKPIKDIYSAITPIYKKLCINTVVKIDGFKYFLGGKTGDYMWLDPAIPVVLDEQAAAYLKAISKVGRADDVENTAQAIDLITAEANEAFYDVLLKKMEAKIFAKAYQTIVEKLASETARERFRELSIGAQCSCLLEILNLLANNKTTFTFFKDKMGVTMSRRKQPMDLTKLEECIVYETSITGLYEKAVSLL

SEQ ID NO: 229 - protein, 650 aa, Haemophilus pittmaniae
MENKNLHYILGLDLGIASVGWAVVEIDKEENPLCLIDVGVRTFERAEVPKTGESLALSRRLARSARRLTQRRVARLKKAKRLLKLENILLSTDERLPHQVWQLRVEGLDRKLKRQEWAAVLLHLIKHRGYLSQRKNESKSENKELGALLSGVASNHELLQQTTYRTPAELAVKKFEVEEGHIRNQQGAYTHTFSRLDLLAEMELLFSRQQHFGNPFASEKLLENLTALLMWQKPALSGEAILKMLGKCTFEDEYKAAKNTYTAERFVWITKLNNLRIQENGLERALNDNERLILIEQPYEKAKLTYAQVRSILNLSDEAIFKGLRYSGEDKKAIETKTTLMEMKAYHQIRKVLEGNNLKAEWTELKENSTLLDEIGTAFSLYKTDEDISTYLAGKLSQPVLNALLENLSFDKFIQLSLKALYKLLPLMQQGLRYDEACHEMYGDHYGKKTYGKKTEENHYFLPQIPADEIRNPVVLRTLTQARKVINGVVRLYGSPARIHIETGREVGKSYKDRRELEKRQEENRKQRENAIKEFKEYFPHFAGEPKAKDILKMRLYKQQNAKCLYSGKPIELHRLLEKGYVEVDHALPFSRTWDDSFNNKVLVLANENQNKGNLTPFEWLDGKHNSERWRAFKALVETSAFPYAKNNAS

SEQ ID NO: 230 - protein, 1062 aa, Ralstonia syzygii
MAEKQHRWGLDIGTNSIGWAVIALIEGRPAGLVATGSRIFSDGRNPKDGSSLAVERRGPRQMRRRRDRYLRRRDRFMQALINVGLMPGDAAARKALVTENPYVLRQRGLDQALTLPEFGRALFHLNQRRGFQSNRKTDRATAKESGKVKNAIAAFRAGMGNARTVGEALARRLEDGRPVRARMVGQGKDEHYELYIAREWIAQEFDALWASQQRFHAEVLADAARDRLRAILLFQRKLLPVPVGKCFLEPNQPRVAAALPSAQRFRLMQELNHLRVMTLADKRERPLSFQERNDLLAQLVARPKCGFDMLRKIVFGANKEAYRFTIESERRKELKGCDTAAKLAKVNALGTRWQALSLDEQDRLVCLLLDGENDAVLADALREHYGLTDAQIDTLLGLSFEDGHMRLGRSALLRVLDALESGRDEQGLPLSYDKAVVAAGYPAHTADLENGERDALPYYGELLWRYTQDAPTAKNDAERKFGKIANPTVHIGLNQLRKLVNALIQRYGKPAQIVVELARNLKAGLEEKERIKKQQTANLERNERIRQKLQDAGVPDNRENRLRMRLFEELGQGNGLGTPCIYSGRQISLQRLFSNDVQVDHILPFSKTLDDSFANKVLAQHDANRYKGNRGPFEAFGANRDGYAWDDIRARAAVLPRNKRNRFAETAMQDWLHNETDFLARQLTDTAYLSRVARQYLTAICSKDDVYVSPGRLTAMLRAKWGLNRVLDGVMEEQGRPAVKNRDDHRHHAIDAVVIGATDRAMLQQVATLAARAREQDAERLIGDMPTPWPNFLEDVRAAVARCVVSHKPDHGPEGGLHNDTAYGIVAGPFEDGRYRVRHRVSLFDLKPGDLSNVRCDAPLQAELEPIFEQDDARAREVALTALAERYRQRKVWLEELMSVLPIRPRGEDGKTLPDSAPYKAYKGDSNYCYELFINERGRWDGELISTFRANQAAYRRFRNDPARFRRYTAGGRPLLMRLCINDYIAVGTAAERTIFRVVKMSENKITLAEHFEGGTLKQRDADKDDPFKYLTKSPGALRDLGARRIFVDLIGRVLDPGIKGD

SEQ ID NO: 231 - protein, 1052 aa, Haemophilus parainfluenzae
MENKNLHYILGLDLGIASVGWAVVEIDEKENPLRLIDVGVRTFERAETQKGESLALSRRSARSARRLTQRRVARLKKAKRLLKSENILLSTDERLPHQVWQLRVEGLDRKLERQEWAAVLLHLIKHRGYLSQRKNESKSENKELGALLSGVASNHELLQQATYRTPAELAVKKFEVEEGHIRNQQGAYTHTFSRLDLLAEMELLFSRQQHFGNPFASEKLLENLTALLMWQKPALSGEDILKMLGKCTFEDEYKAAKNTYTAERFVWITKLNNLRIQENGLERALSDNERLMLIEQPYEKAKLTYAQVRSILNLSDDAIFKGVRYSGEDKKAIETKTTLMEMKAYHQIRKVLEGNNLKAEWVALKANPTLLDEIGTAFSLYKTDEDISAYLAGKLSQPVLNALLENLSFDKFIQLSLKALYKLLPLMQQGLRYDEACREIYGDHYGKKTEETHHFLPQIPADEIRNPVVLRTLTQARKVINGVVRLYGSPARIHIETGREVGKSYKDRHELKKRQEENRKQREKTISEIKTLFPNFSGEPKGKDILKMRLYYQQNAKCLYSGKPLELHRLFEQKYVEVDHALPLSRTWDDSFNNKVLVLANENQNKGNLTPFEWLDGKNNSERWRTFKALVETSAFPYAKKQRILSQKLDEKGFIERNLNDTRYVARFLCNFIADNMHLTGEGKRKVFASNGQITALLRRRWGLAKSREDNDRHHALDAVLVACSTVAMQQKITRFVRFKAGDVFTGERIDRETGEIIPLHFPTPWQFFKQEVEIRIFSDNPKLELENRLPDRPQANHEFVQPLFVSRMPTRKMTGQGHMETVKSAKRLNEGISMIKMPLTKLKLKDLELMVNREREKDLYDALKTRLEAFNDDPAKAFAEPFMKKGGAIVKSVRVEQVQKSGVLVRQGNGVADNASMVRVDVFTKDGKYFLVPIYTWQVAKGILPNKAVIQGKDEEDWEDIDDATFQFSLHPNDLISVKTKKDEFLGYFNGLNRHTGGINIRTHDLEKSKGKQGIFEGIGVKIALSFEKYQIDELGKNIRLCKPSKRQPVR

SEQ ID NO: 232 - protein, 1331 aa, Lactobacillus sanfranciscensis
MNKQPYNIGLDIGTSSVGWSATELDNRLLHIKGHNGIGVRLFKEGESAADRRGFRTTRRRLARRKWRLRLLNEIFATEIAKVDPSFFARLKQSNVSPKDPNKTMFENILFDDENLDDQKFHHDYKTIYHLRQAIINHPEQKFDIRLIYLAMHHIIKYRGHFLNQANVQDFKGGKIDLEKSFKALNDIFENQGRDLRLVTDKANQYVKVLSDNAKTRSDRKKELSKLLYVPIDKDTDKNSKKVTGEILKAILGNKAKFDVIFGIEVENPKEWVLTFNSDDFDDKIEGLSSQMTDEDSEILLILKELYFALNLSDILNNSVTDKNAKTLSEAMINRYDDHKNQLAMLKKVIDSSDKKHAKELKEAYSAYIDGENNKKISFEDLKKRIQKNLVDSELSQKINDLLDHDYFLPKQRSKENGAIPHQLQQQELDQIIESQKQYYPFLAELNPNEKRSRQAKYKLDELVAFRVPYYVGPMVEVTDSNQENNGKFAWMIRKEQGEITPWNFDEKVDRTETATKFITRMTTTDTYLIGEPVLPKNSLLYQKFVVLNELNNLKINQEIITPGQKQYLYEHVMKKNKRVTLKKIADALVIKGDYPYAPEVKGTTDQKNLNNGLTTYIDLAKIFGNELDDVDREADFEKIIEWSTIFEDQHIFALKLQELKWLTEKQRNQVVKLRYQGWGKLSKELLAGLVDDNGQRIIDLLWSDNQNFMQIVNQKSFKESIADHNGAHLEEKNLKDVINDLYTSPQNKKAIRQVILVVDDIINAVGYEPANIMMEFAREDSNDHRLTNSRSRQLENVYKDITNSWFDNDSVKDELEDKIKNKDKFTDRLYLYFTQGGKDLYTGEPLNIDDLSSYDIDHILPQSFILDNSLDNRVLTSQRNNRVSKEDQLPGELFGTKMHAFWKRLKAAHLISNKKYYNLTLTPNSISKFNNQGRFINRQLVETRQVIKLAAEILHNRYSEEKGTNIVTIKANLTHHMREKFNFYKNRNVNDYHHAFDAYLTAFVGNWLLQQYPKLKPYFVYGDFAKTEINNLKSFNMLYKFEQAHQLNEKDGKIAKDADALLGYMKNVYHFKKMLVTKKLETNHGALFKQTLYPSPAHDIKKRQLIKPKDNRPTDIYGGYTHEERKYMSLVKVIGKKDNEYRMANVPLLKINKNNDIKEILKSQFSNKKFEIVLPKVLKNQLFSENGALFVIGSKGYKYNANQLVLSDLDMKLLNDLSNNKSIDEVTINQLFKNIVDSTNKYMPLYEIKNLNEVVEKFNNLEFNDKKKTITDFLLATHANPTMSNLKNIGLPSYFGRFTSGNAGIKLSENANVIYQSPTGLFSRKVKISDF

SEQ ID NO: 233 - protein, 1473 aa, Flavobacterium branchiophilum
MAKILGLDLGTNSIGWAVVERENIDFSLIDKGVRIFSEGVKSEKGIESSRAAERTGYRSARKIKYRRKLRKYETLKVLSLNRMCPLSIEEVEEWKKSGFKDYPLNPEFLKWLSTDEESNVNPYFFRDRASKHKVSLFELGRAFYHIAQRRGFLSNRLDQSAEGILEEHCPKIEAIVEDLISIDEISTNITDYFFETGILDSNEKNGYAKDLDEGDKKLVSLYKSLLAILKKNESDFENCKSEIIERLNKKDVLGKVKGKIKDISQAMLDGNYKTLGQYFYSLYSKEKIRNQYTSREEHYLSEFITICKVQGIDQINEEEKINEKKFDGLAKDLYKAIFFQRPLKSQKGLIGKCSFEKSKSRCAISHPDFEEYRMWTYLNTIKIGTQSDKKLRFLTQDEKLKLVPKFYRKNDFNFDVLAKELIEKGSSFGFYKSSKKNDFFYWFNYKPTDTVAACQVAASLKNAIGEDWKTKSFKYQTINSNKEQVSRTVDYKDLWHLLTVATSDVYLYEFAIDKLGLDEKNAKAFSKTKLKKDFASLSLSAINKILPYLKEGLLYSHAVFVANIENIVDENIWKDEKQRDYIKTQISEIIENYTLEKSRFEIINGLLKEYKSENEDGKRVYYSKEAEQSFENDLKKKLVLFYKSNEIENKEQQETIFNELLPIFIQQLKDYEFIKIQRLDQKVLIFLKGKNETGQIFCTEEKGTAEEKEKKIKNRLKKLYHPSDIEKFKKKIIKDEFGNEKIVLGSPLTPSIKNPMAMRALHQLRKVLNALILEGQIDEKTIIHIEMARELNDANKRKGIQDYQNDNKKFREDAIKEIKKLYFEDCKKEVEPTEDDILRYQLWMEQNRSEIYEEGKNISICDIIGSNPAYDIEHTIPRSRSQDNSQMNKTLCSQRFNREVKKQSMPIELNNHLEILPRIAHWKEEADNLTREIEIISRSIKAAATKEIKDKKIRRRHYLTLKRDYLQGKYDRFIWEEPKVGFKNSQIPDTGIITKYAQAYLKSYFKKVESVKGGMVAEFRKIWGIQESFIDENGMKHYKVKDRSKHTHHTIDAITIACMTKEKYDVLAHAWTLEDQQNKKEARSIIEASKPWKTFKEDLLKIEEEILVSHYTPDNVKKQAKKIVRVRGKKQFVAEVERDVNGKAVPKKAASGKTIYKLDGEGKKLPRLQQGDTIRGSLHQDSIYGAIKNPLNTDEIKYVIRKDLESIKGSDVESIVDEVVKEKIKEAIANKVLLLSSNAQQKNKLVGTVWMNEEKRIAINKVRIYANSVKNPLHIKEHSLLSKSKHVHKQKVYGQNDENYAMAIYELDGKRDFELINIFNLAKLIKQGQGFYPLHKKKEIKGKIVFVPIEKRNKRDVVLKRGQQVVFYDKEVENPKDISEIVDFKGRIYIIEGLSIQRIVRPSGKVDEYGVIMLRYFKEARKADDIKQDNFKPDGVFKLGENKPTRKMNHNQFTAFVEGIDFKVLPSGKFEKI

SEQ ID NO: 234 - protein, 933 aa, Mycoplasma iowae
SVRDYSDGPGSEKSPTPYGLWRLNKEGKVEKIGENLWDVLVGKCTIYGNDDSIKDEKTKLRGGKNSPIAEVFNFINDLTNIYLFSSSKLKLNSKTKLSILDEFNISLKTSKPIKSFSEKKLVKHIISTTEFKDINFDDVYGYRIDTSKKPLFTKLENTITIAKWLLDNNVYNELNIYDQEDLIKINNIFVILQKSMDINKRAQLVSDEYKIDLPICLELVKKIKGVMQTHSFSYKAMLEYIPVGIKYNDLETGEDTSINASTYFVDKINNLNTKLLFNGRPRKYIPKNIFEDGIISPTSKRAFIQTINVLNKIIKVYSKDYDIDNIAIELPRDKNTAEERKKISSNQKKAGEEIAEVLKFAGLNVEEYTSKLNSKTKLKLKLLKEQNYKDIYDGQEIDVIDVIKNSNKYHEEHIIPYSLCFIDSRRNKVLTKFENNKQKGNKTPFQWLSSIGKYAEFKDRVEKLFVEQKISKAKKELLLFEQDPRTEMLGFIEKNLSDTRYASKLVFDTFRDFFKVNNPNVKIKVINGALTNYARYNLFATYKDGLLERKGIMKQREFYEHHGIDATILAFLGSNHKINQLLKLSHKFKKQDDNKIYDENTGELIEFTKDFLSDEARKKAMELSKQIFEIPCKFSRPIYRKSNVSFSNETLISMKWIDDKYTKGVKINKLSLVNKDLDLNEYFADYETNEMKNLICYQEDKTLYNKLKNIYDKYNNFVENSNIKPVKNPFINYMISNFSSDDSKIQNFKHIIFYDHKGNKKFVKSLKVCGDEKNLSNIVLRKDQKDIMNSKKIKKSGILESLNPISARIYKDNKGKYITIPINSLVLNWTKKGLEIDNEKLCNILKSKNIFNNQFIEINAGQSIINNENKLFYFVGGGDFKVNKLEIKSQFCDNEIFFPRKQMNISIATIIDNYKLCEVDELGKIYNIRKIVL

SEQ ID NO: 235 - protein, 1358 aa, Acidaminococcus intestini; identical to SEQ ID NO: 99

SEQ ID NO: 236 - protein, 983 aa, Campylobacter jejuni
MARILAFDIGISSIGWAFSENDELKDCGVRIFTKAENPKTGESLALPRRLARSARKRLARRKARLNHLKHLIANEFKLNYEDYQSFDESLAKAYKGSLISPYELRFRALNELLSKQDFARVILHIAKRRGYDDIKNSDDKEKGAILKAIKQNEEKLANYQSVGEYLYKEYFQKFKENSKEFTNVRNKKESYERCIAQSFLKDELKLIFKKQREFGFSFSKKFEEEVLSVAFYKRALKDFSHLVGNCSFFTDEKRAPKNSPLAFMFVALTRIINLLNNLKNTEGILYTKDDLNALLNEVLKNGTLTYKQTKKLLGLSDDYEFKGEKGTYFIEFKKYKEFIKALGEHNLSQDDLNEIAKDITLIKDEIKLKKALAKYDLNQNQIDSLSKLEFKDHLNISFKALKLVTPLMLEGKKYDEACNELNLKVAINEDKKDFLPAFNETYYKDEVTNPVVLRAIKEYRKVLNALLKKYGKVHKINIELAREVGKNHSQRAKIEKEQNENYKAKKDAELECEKLGLKINSKNILKLRLFKEQKEFCAYSGEKIKISDLQDEKMLEIDHIYPYSRSFDDSYMNKVLVFTKQNQEKLNQTPFEAFGNDSAKWQKIEVLAKNLPTKKQKRILDKNYKDKEQKNFKDRNLNDTRYIARLVLNYTKDYLDFLPLSDDENTKLNDTQKGSKVHVEAKSGMLTSALRHTWGFSAKDRNNHLHHAIDAVIIAYANNSIVKAFSDFKKEQESNSAELYAKKISELDYKNKRKFFEPFSGFRQKVLDKIDEIFVSKPERKKPSGALHEETFRKEEFYQSYGGKEGVLKALELGKIRKVNGKIVKNGDMFRVDIFKHKKTNKFYAVPIYTMDFALKVLPNKAVARSKKGEIKDWILMDENYEFCFSLYKDSLILIQTKDMQEPEFVYYNAFTSSTVSLIVSKHDNKFETLSKNQKILFKNANEKEVIAKSIGIQNLKVFEKYIVSALGEVTKAEFRQREDFKK

SEQ ID NO: 237 - protein, 1338 aa, Streptococcus macacae
MTKPYSIGLDIGTNSVGWAVVTDGYKVPAKKMKVLGNTDKSHIKKNLLGALLFDSGNTAKDRRLKRTARRRYTRRRNRILYLQEIFAEEMAKADESFFQRLNESFLTNDDKEFDSHPIFGNKAEEEAHHHKFPTIFHLRKHLADSTEKSDLRLIYLALAHMIKFRGHFLIEGQLKAENTNVQTLFDDFVEVYDKTVEESHLSEISVSSILTEKISKSRRLENLIKYYPTEKKNTLFGNLIALSLGLQPNFKTNFKLSEDAKLQFSKDTYEEDLGELLGKIGDNYADLFISAKNLYDAILLSGILTIDDNTTKAPLSASMIKRYEEHQEDLAQLKKFIRQNLPDQYSEVFSDKTKDGYAGYIDGKTNQEAFYKYIKNMLSKTEGADYFLDKIDREDFLRKQRTFDNGSVPHQIHLQEMHAILRRQGEYYPFLKENQDKIEKILTFRIPYYVGPLARKGSRFAWAEYKADKKVTPWNFDDILDKEKSAEEFITRMTLNDLYLPEEKVLPKHSLVYETFNVYNELTKVKYVNEQGKAIFFDANMKQEIFDHVFKENRKVTKDKLLNYLNKEFEEFRIVNLTGLDKENKAFNSSLGTYHDLRKILDKSFLDDKVNEKIIEDIIQTLTLFEDREMIRQRLQKYSDIFTTQQLKKLERRHYTGWGRLSAKLINGIRDKQSNKTILGYLIDDGYSNRNFMQLINDDSLPFKEEIARAQVIGETDDLNQLVSDIAGSPAIKKGILQSLKIVDELVKVMGHNPANIVIEMARENQTTAKGRRSSQQRYKRLEEAIKNLDHDLNHKILKEHPTDNQALQNDRLFLYYLQNGRDMYTEDPLDINRLSDYDIDHIIPQSFIKDDSIDNKVLVSSAKNRGKSDNVPSEDVVNRMRPFWNKLLSCGLISQRKYSNLTKKELKPDDKAGFIKRQLVETRQITKHVAQILDARFNTKRDENKKVIRDVKIITLKSNLVSQFRKDFKFYKVREINDYHHAHDAYLNAVIGKALLDVYPQLEPEFVYGEYPHFHGYKENKATAKKFFYSNIMNFFKKDDIRTDENGEIVWKKDEHISNIKRVLSYPQVNIVKKVEIQTVGQNGGLFDDNPKSPLEVTPSKLVPLKKELNPKKYGGYQKPTTAYPVLLITDTKQLIPISVMNKKQFEQNPVKFLRDRGYQQVGKNDFIKLPKYTLVDIGDGIKRLWASSKEIHKGNQLVVSKKSQILLYHAHHLDSDLSNDYLQNHNQQFDVLFNEIISFSKKCKLGKEHIQKIENVYSNKKNSASIEELAESFIKLLGFTQLGATSPFNFLGVKLNQKQYKGKKDYILPCTEGTLIRQSITGLYETRVDLSKIGED

SEQ ID NO: 238 - protein, 1265 aa, Mycoplasma ovipneumoniae
MHNKKNITIGFDLGIASIGWAIIDSTTSKILDWGTRTFEERKTANERRAFRSTRRNIRRKAYRNQRFINLILKYKDLFELKNISDIQRANKKDTENYEKIISFFTEIYKKCAAKHSNILEVKVKALDSKIEKLDLIWILHDYLENRGFFYDLEEENVADKYEGIEHPSILLYDFFKKNGFFKSNSSIPKDLGGYSFSNLQWVNEIKKLFEVQEINPEFSEKFLNLFTSVRDYAKGPGSEHSASEYGIFQKDEKGKVFKKYDNIWDKTIGKCSFFVEENRSPVNYPSYEIFNLLNQLINLSTDLKTTNKKIWQLSSNDRNELLDELLKVKEKAKIISISLKKNEIKKIILKDFGFEKSDIDDQDTIEGRKIIKEEPTTKLEVTKHLLATIYSHSSDSNWININNILEFLPYLDAICIILDREKSRGQDEVLKKLTEKNIFEVLKIDREKQLDFVKSIFSNTKFNFKKIGNFSLKAIREFLPKMFEQNKNSEYLKWKDEEIRRKWEEQKSKLGKTDKKTKYLNPRIFQDEIISPGTKNTFEQAVLVLNQIIKKYSKENIIDAIIIESPREKNDKKTIEEIKKRNKKGKGKTLEKLFQILNLENKGYKLSDLETKPAKLLDRLRFYHQQDGIDLYTLDKINIDQLINGSQKYEIEHIIPYSMSYDNSQANKILTEKAENLKKGKLIASEYIKRNGDEFYNKYYEKAKELFINKYKKNKKLDSYVDLDEDSAKNRFRFLTLQDYDEFQVEFLARNLNDTRYSTKLFYHALVEHFENNEFFTYIDENSSKHKVKISTIKGHVTKYFRAKPVQKNNGPNENLNNNKPEKIEKNRENNEHHAVDAAIVAIIGNKNPQIANLLTLADNKTDKKFLLHDENYKENIETGELVKIPKFEVDKLAKVEDLKKIIQEKYEEAKKHTAIKFSRKTRTILNGGLSDETLYGFKYDEKEDKYFKIIKKKLVTSKNEELKKYFENPFGKKADGKSEYTVLMAQSHLSEFNKLKEIFEKYNGFSNKTGNAFVEYMNDLALKEPTLKAEIESAKSVEKLLYYNFKPSDQFTYHDNINNKSFKRFYKNIRIIEYKSIPIKFKILSKHDGGKSFKDTLFSLYSLVYKVYENGKESYKSIPVTSQMRNFGIDEFDFLDENLYNKEKLDIYKSDFAKPIPVNCKPVFVLKKGSILKKKSLDIDDFKETKETEEGNYYFISTISKRFNRDTAYGLKPLKLSVVKPVAEPSTNPIFKEYIPIHLDELGNEYPVKIKEHTDDEKLMCTIK

SEQ ID NO: 239 - protein, 1535 aa, Flavobacterium columnare
MTKILGLDLGTNSIGWAIRDTENEGINQILDKGARIFSEGVKSENGKEISRAAERTAYRSARKIKYRRKLRKYETLKVLSINGMCPLSVEEVEQWKKSGFKEYPLNPEFLDWLRTNEDKNINPYLFRDKASKQKVTLFELGRALYHIAQRRGFLSNRLDQSAEGVFEEHNPQIQNLIEDLDSSNTILNELKEYYINLGIIDETEKSGFKKDLDEGEKKLKSLYNSLVAITKKNANDIETCKQELIARLNKKEDLGKVKGKIKDISQAMLDRNFKTLGQYFFSLYNKERIRNQYTSREEHYLEEFIIICQTQGIEGINTNEKLPEKKFTGLAKDLYRAIFFQRPLKSQKGLIGKCSFEKNKSRCAVSHPDYEEFRMWSYLNTIKIGTQSEKTLRFLTLEEKLKLVPKFYRKSDFNFEVLAKELVEKGASFGYYKSSKKNEFFYWFNYKPTDSVSACVVSASLENAIGKDWKIKTFEYQTRNTEKNEVTKSVDYKDLWHLLSVATSDTYLYDFAIEKLKLEPKNAKAFSKTKLKKDFASLSLAAIAKILPYLKQGLLYSHAVFMANIENIVDADIWKDEEQQKFIQSKIVELVDNYIVEKSKLELINGLLKIYNTEDKEGRKVYYSKEAESLFEADLRKKLVPFYKANIIIEEHEQEIIFQDLFPILMDQLKKQEFIKIGRLDKQIEAFLEGENEEGQIFCNHTDKLKKLYHPSDIEVFKKKTIKDEWGNEKVVLGSPLTTSIKNPMAMRALHQLRKVLNTLIANDQIDEDTRIHIEMARELNDANKRKGIQDFQNENKKFREEAIKEIKKLYLEECHKDVNPTEDDILRYQLWLEQGKCEIYEEGNNISICDIIGSNPSYDIEHTIPRSISQDNSQMNKTLCSLKFNRSIKKQKMPVELSNYNDILPRIAHWKKEAEELTRQIETISRSIKSAATKVAKDKNIRKRHYLTLKRDYILGKYERFTWEEPKVGFKNSQIPDTGIITKYAQAYLKSYFKRVESVKGGAVAEFRKLWGIQESFIDENWWKHYKDKDRDKHTHHTIDAITIACMPKDKYDLLAHAWRLEDEQDKKAAKVLIEQAKPWKTFKEDIEKIETEILVSHFTPDNVKKQSKSIIKNRGKKVYVLKNELPVNFKNKIEGKDYFKLKFDSKILYKIPKKKEKQTDTFYEELPKNYLNGVEGKDYFKINTTGKTFYKIPIFNQGDTIRGSLHQETTYGAIKLPDIDIETKKPLHTDKGGFILKKDIKGNEIVFFVVRKEISKISENDVQNIVDNVVRKKIENAIANSLITFKIVKKKKVAVIKEGVTIWMREPNIEKGIEGIPIKKVRIITNSVKNPIEIKVHSPLSKSRHKHKQKVYGQNDENYAMALYELDGKREFELINNFNLAKLLKQSQSYYPLHKEKEIKGKKILVPIEKRNNKDVILKRGQQVVFYDKTVENPKDISEIIDFRERIYIIEGLTIQRQKDKKTSKVNEYGIIQLRHFKEARKSEEISKDNFKPDGEFKINENKPTRKMNHNQFTAFVEGIDFKVLPSGKFQKI

SEQ ID NO: 240 - protein, 1459 aa, Flavobacterium columnare
MKFNLGLDIGTNSIGWALVNEDYENKKGKIIAAGSRIIPMTQDILDKFGSGAITETQTALRTDYRSKRKLIQRFLLRRERLHRVLNVLDFLPKHYAESIDFEKYFGKFLPNTEPKLAYNQNQFIFQNSFLEMLKEFQEKHPELLTNNKKIPYDWTIYYLRKKALNQRIEKEELAWLLLQFNQKRGYNQLRDEEEESVPNKQVEFYSLKIIDVVADQPKEGRDKRWYSINLENGWTYRRESKTPLFNWEGKTKDFIVTTDLNQDGSIKKDKEGKEKRSFRAPSEGDWTLLKKKTEKEIYESGKTLGTYIYDALLNTPDLKIKGDFIRTIDRSIYKEELQQIINKQKEYHLELNSSKLYKACLEELYPKNEIYKSALKNKDIAYLFINDILYYQRPLKAPKYNIGKCTYESRTFKKEDKKIREYIPAVAKSHPLFQEFRLWQWIKNLKIYEKLSSDNCTDFFLTNEQDFENLFEFLWNKKEIDHKGILEYLVKTKFPDLKPKQVKTKVKEYRWNYVYDHEKDESKTYPCGETYFLLKNKLDKIYNAQDDFLDKERLYNLWHIIYSVTDKKQYEKALAKFALKNHLDTKSFVNTFKRIPPFKNDYAIYSLKAIKKLLPLMRVGKYWNYDDIDPITKQKIQCIITGEENDTISTLVREKTNHFSNENDFKNLPLWLAGYIVYNSHNESSEIEKWKSPQDIDTFLKKFKQHALRNPIVEQVVTETLRVVRDIWSKKGQGKKDFFNEIHIELGKDLKNPVDKRRKLSSTNTKNESTNTRIKALLIELFTQGVENVKPNSPKHQEILKIFEEGALNSGIEIEEDIIKISNTDQPTKKQLELYILWLEHKYKSPYTGQSIPLSKLFTPNYEIEHIIPRSKYYDDNLSNKVICETEINRLKNNQLGYEFINNHEIREVTLEEGKTIRLLSPEQYWNFVTTYYAKNKAKRENLLLKELPVQMVEKQLNDTRYVSKYVMQLLSKIVRKEDGTDNGINSTNILSISGKMTRALKNDWDLNDVWNDLLLYRFERLNTITKTNLFTTYSEQKQKRMPIVPDQYAKGFHKKRLDHRHHALDAIVIACITRNHINYMNNQNIQGEKLKKNAIEKENYREILQKSRLDIRAQLCEKKYNDNDPTKYNWVFIKPWADFTENTKDILESIIPSFKQNLRIINKTVNYYEKYNENGKKVKVRQIKGDNWAIRKPLHKETISGKVHLSYKTPAKGKILTATRKVLDSSMDFKSIEKITDTGIQKILKNYLEYKKSPELAFSPEGIEELNATITKYNNGFHHKPIYKVRIYEEGVKFPLGNKGNKKSKYVEAEKGTNLFFAIYKDQENNRYFETIPFNDVLETLKKGMSAVPEKNQEENTLVFALSPQDLVFVPTLDEIENPDIVDFKNLTKDQTNRIYKMVSSSGKQCFFIKAEVATSIVNKMEFSTSNKMENSIEGIQIKSNCWKLKLDRLGTITRVIK

SEQ ID NO: 241 - protein, 1389 aa, Oenococcus kitaharae
MARDYSVGLDIGTSSVGWAAIDNKYHLIRAKSKNLIGVRLFDSAVTAEKRRGYRTTRRRLSRRHWRLRLLNDIFAGPLTDFGDENFLARLKYSWVHPQDQSNQAHFAAGLLFDSKEQDKDFYRKYPTIYHLRLALMNDDQKHDLREVYLAIHHLVKYRGHFLIEGDVKADSAFDVHTFADAIQRYAESNNSDENLLGKIDEKKLSAALTDKHGSKSQRAETAETAFDILDLQSKKQIQAILKSVVGNQANLMAIFGLDSSAISKDEQKNYKFSFDDADIDEKIADSEALLSDTEFEFLCDLKAAFDGLTLKMLLGDDKTVSAAMVRRFNEHQKDWEYIKSHIRNAKNAGNGLYEKSKKFDGINAAYLALQSDNEDDRKKAKKIFQDEISSADIPDDVKADFLKKIDDDQFLPIQRTKNNGTIPHQLHRNELEQIIEKQGIYYPFLKDTYQENSHELNKITALINFRVPYYVGPLVEEEQKIADDGKNIPDPTNHWMVRKSNDTITPWNLSQVVDLDKSGRRFIERLTGTDTYLIGEPTLPKNSLLYQKFDVLQELNNIRVSGRRLDIRAKQDAFEHLFKVQKTVSATNLKDFLVQAGYISEDTQIEGLADVNGKNFNNALTTYNYLVSVLGREFVENPSNEELLEEITELQTVFEDKKVLRRQLDQLDGLSDHNREKLSRKHYTGWGRISKKLLTTKIVQNADKIDNQTFDVPRMNQSIIDTLYNTKMNLMEIINNAEDDFGVRAWIDKQNTTDGDEQDVYSLIDELAGPKEIKRGIVQSFRILDDITKAVGYAPKRVYLEFARKTQESHLTNSRKNQLSTLLKNAGLSELVTQVSQYDAAALQNDRLYLYFLQQGKDMYSGEKLNLDNLSNYDIDHIIPQAYTKDNSLDNRVLVSNITNRRKSDSSNYLPALIDKMRPFWSVLSKQGLLSKHKFANLTRTRDFDDMEKERFIARSLVETRQIIKNVASLIDSHFGGETKAVAIRSSLTADMRRYVDIPKNRDINDYHHAFDALLFSTVGQYTENSGLMKKGQLSDSAGNQYNRYIKEWIHAARLNAQSQRVNPFGFVVGSMRNAAPGKLNPETGEITPEENADWSIADLDYLHKVMNFRKITVTRRLKDQKGQLYDESRYPSVLHDAKSKASINFDKHKPVDLYGGFSSAKPAYAALIKFKNKFRLVNVLRQWTYSDKNSEDYILEQIRGKYPKAEMVLSHIPYGQLVKKDGALVTISSATELHNFEQLWLPLADYKLINTLLKTKEDNLVDILHNRLDLPEMTIESAFYKAFDSILSFAFNRYALHQNALVKLQAHRDDFNALNYEDKQQTLERILDALHASPASSDLKKINLSSGFGRLFSPSHFTLADTDEFIFQSVTGLFSTQKTVAQLYQETK

SEQ ID NO: 242 - protein, 1425 aa, Prevotella micans
MIQKIFGLDLGTNSIGSSVRNLELGENLTEQLEFFSSDIFGSSVSKNSNGREYSLAGNRSAHRRSRGLNEARRRKLWATLDLLIEHGLCPMSPDSLMQWRTYDKQKGLYRQYPIEDKDFNAWIMLDFNGDGKPDYSSPYQLRRELVVRQFDFDQPIERYKLGRALYHIAQHRGFKSSKGETIADQEKNEKKPIAEEGADIANEMKASETKLSKGLVAYMQENHLKTVGEAFAKLEDERVRIRNNESYRAIRSQYQDEIKEIFTYQKKLSVESELYERLTSEKKGVGTIFYKRPLRSQRGNVGKCTLERNKPRCPIGRPEFEEFRAWTLINNIKIRETAGEPYKQLPIKLRQELLKDCFLSKVKADFKFEDIRKYIEKRLGLSFSNDDKTINYKDSVSIAACPVTVRMKKLLGENWANCRIDGEKRRQAHGKNNNNEHIVSYTEEDIWHVCYNAEDPEEVSNFARKALHWDENKIKELVRLWTSIPQGYAMLSLKAIRNINRMLLLGLKYSDAVLLAKLPDIVPVSDEDILAITKEFLQLEDKLNQEKQINNIVNSLIANYKSKLEENRFADHNYQYQLGEGDDEDINTQIKSHIGAKLWVQIGADEQTKIFQAVRSKYQDFFKSYKRKFVESPKLGELLVAFLTEKFPNVKSKQWERLYHPSQIAIYRPIPVDNDRSKLRLGNPNIGAIKNPTVMRVLNTLRRRVNQLLDDGVISPDETRVVVETARELNDANTKWALDRYNRIRRDENEKIRKILKELNPTTNSISEQDIDKARYIFEQCETDFYTDGKVPYYNKDIKKYKLWLEQGGQCLYTGQTINLTNLFNPNAFDMEHTIPKSISFDNSDQNLTLCESYYNRFIKKNNIPTDMPNYDKDVTINGKEYTAIKPRLQRWKERVDRLSRNVDFWKGQARRAQDKDRKDECIREKHLWDMELAYWKGKLERFTMTDVTDGFKNSQLVDTRVITRHAVLYLKSIFNHVEVQRGETTAEFRKILGLQSIDEKKDRSLHSHHAIDATMLTVIPSAAKRDRMLELFYKIEETKKALKNYNDNNKTGLNLELKGLEEKLDKEKKDCRVGRRVNDLDRFINENIIVSHHTKDQALTPAHRRLRKRGKIVGGKEHPRWQTGDSLRGEIHKASYYGAITQFAKDANGKVLMKDGQAQIDPTIYYVIRRELKYKRSTQDSGFTNWEDLEKVIVDTDLFGLMKGQFPEGTSFKDACEQGFYMIKKGKNGEGDVKTHRIRHVRCKAVKTALRIKEQTYKSSKDYKQFFYAAVGDLYVMCYYTDGKKRDFKIYSLYDISNHRKSGTEDIPKFITDKKGNHLPLDYKLRTGDMVLLYKDNPEELKDLDQVNLKRRLYKVNRFESEGLIILLTHHLSTTTERGCSIGKIENYQNLPTAIRCGIKTIKFLIMGKHRDFVIRNGNIEFKH

SEQ ID NO: 243 - protein, 1473 aa, Mucilaginibacter paludis
MKNILGLDLGTNSIGWALIEKDTDQKNGNILGTGSRIIPMSQDIKDEFGKGNSISQTADRTKFRSVRRLRERHLLRRERLHRVLNVLGFLPKHYADQIDFKKRLGKLVNETEPKLVYDNKNFIFKKSFEAMLSDFNQHQPLLLADGKKVPFDWTIYYLRKKALTEKIEKEELAWLILNFNQKRGYYQLRGEEEEENPNKMVAFHSLKIVEVIADESQKGKAETWYSLILENGWIYRRSSKTPLYDWKGKQRDFIVTTDLNDDGSIKTDKEGLEKRSFRAPVEDDWTLVKKKTEQEINRSHKTVGTYIYENLLQDPKQKIKGKLVRTIEREFYKDELKMILKNQQKFHPELNDEHLYINCVRELYRNNQAHQTILSKKDFVHLFIDDIIFYQRPLRSQKSSISNCTLEFRKYKNENGTDQTDYLKAIPKSHPLFQEFRLWQWIYNLGIYQKEDDTNVTDELIKNIDGYQDLFDFLNNKKEIRQDILIKFLVEQTGLKGKPLSSVVAKYRWNFVEDKIYPCNETGTQIRTRLAKVENTPEDFLTAETEIKLWHIIYSVNDKADYEKALKTFAEKHNLDTHSFVENFKKFPPFKSEYGSFSEKAIKKLLPLIRLGKYWSWENIDKKTQERIEKILTGEFDEAIKSRVRDKAIHLTEEDHFQGLQLWLASYVVYGRHSEADNLDKWHTVADLEDYLAEFRQHSLRNPIVEQVITETLRVVKDIWLQYGQGAKDFFSEIHIELAREMKNTGDERKRLTSLVTDNENTNLRIKVLLSELLNDGNVENVRPYSPMQQEALKIFEDGVLNSDIEIEDDILKISKMAQPTNTELKRYKLWLEQKYRSPYTGQIIPLNRLFTADYEIEHIIPQSRFFDDSFSNKIICESAVNQLKDKQLGLEFIKNHSGTIVKLGMGKTAKILDVESYNEFVKGNYTKNISKRNKLMLEEIPDKMIERQLNDTRYISKFIISALSNIVRSESNDDGFNSKNVLPGNGKITSRLKQDWGMNDIWNELILPRFERMNKITDSAVFTAWNENNQKFLPIVPLEFSKGFQKKRIDHRHHALDALVIAASTREHINLLNNEHAKSDKRFDLNRKLRKFEKVAYNDPKTGKRIEKEVPTIFLKPWETFTVDAKNSLESIIVSFKQNLRVINRATNYSESYNDENGALRLGKDGNPLKEKIKQSKGDSWAIRKPMHKDFVYGKVHLQNVKLPKDKFITAIRKSLDVTFDLKRIETITDTGIQKILKNYLHSKENKVELAFSPEGIEDMNQHIERYNDGKKHQPIHKVRVFEIGSRFSLGESGNKKTKFVEAAKGTNLFFAVYQDDNKGKRNYETIPLNIVIERQKLGLHSVPTEDAKGGKLLFHLSPNDMVYVPTSEELEDNLASVNIKRLNTAQRKRIYKVEKASGVECYFIRQDIAYLIKNYDAKTKIGELESQNKLQTTMTDDRLKITDVCVKLNIDRLGSIAETFLGNQYGASKKT

SEQ ID NO: 244 - protein, 1365 aa, Filifactor alocis
MTKEYYLGLDVGTNSVGWAVTDSQYNLCKFKKKDMWGIRLFESANTAKDRRLQRGNRRRLERKKQRIDLLQEIFSPEICKIDPTFFIRLNESRLHLEDKSNDFKYPLFIEKDYSDIEYYKEFPTIFHLRKHLIESEEKQDIRLIYLALHNIIKTRGHFLIDGDLQSAKQLRPILDTFLLSLQEEQNLSVSLSENQKDEYEEILKNRSIAKSEKVKKLKNLFEISDELEKEEKKAQSAVIENFCKFIVGNKGDVCKFLRVSKEELEIDSFSFSEGKYEDDIVKNLEEKVPEKVYLFEQMKAMYDWNILVDILETEEYISFAKVKQYEKHKTNLRLLRDIILKYCTKDEYNRMFNDEKEAGSYTAYVGKLKKNNKKYWIEKKRNPEEFYKSLGKLLDKIEPLKEDLEVLTMMIEECKNHTLLPIQKNKDNGVIPHQVHEVELKKILENAKKYYSFLTETDKDGYSVVQKIESIFRFRIPYYVGPLSTRHQEKGSNVWMVRKPGREDRIYPWNMEEIIDFEKSNENFITRMTNKCTYLIGEDVLPKHSLLYSKYMVLNELNNVKVRGKKLPTSLKQKVFEDLFENKSKVTGKNLLEYLQIQDKDIQIDDLSGFDKDFKTSLKSYLDFKKQIFGEEIEKESIQNMIEDIIKWITIYGNDKEMLKRVIRANYSNQLTEEQMKKITGFQYSGWGNFSKMFLKGISGSDVSTGETFDIITAMWETDNNLMQILSKKFTFMDNVEDFNSGKVGKIDKITYDSTVKEMFLSPENKRAVWQTIQVAEEIKKVMGCEPKKIFIEMARGGEKVKKRTKSRKAQLLELYAACEEDCRELIKEIEDRDERDFNSMKLFLYYTQFGKCMYSGDDIDINELIRGNSKWDRDHIYPQSKIKDDSIDNLVLVNKTYNAKKSNELLSEDIQKKMHSFWLSLLNKKLITKSKYDRLTRKGDFTDEELSGFIARQLVETRQSTKAIADIFKQIYSSEVVYVKSSLVSDFRKKPLNYLKSRRVNDYHHAKDAYLNIVVGNVYNKKFTSNPIQWMKKNRDTNYSLNKVFEHDVVINGEVIWEKCTYHEDTNTYDGGTLDRIRKIVERDNILYTEYAYCEKGELFNATIQNKNGNSTVSLKKGLDVKKYGGYFSANTSYFSLIEFEDKKGDRARHIIGVPIYIANMLEHSPSAFLEYCEQKGYQNVRILVEKIKKNSLLIINGYPLRIRGENEVDTSFKRAIQLKLDQKNYELVRNIEKFLEKYVEKKGNYPIDENRDHITHEKMNQLYEVLLSKMKKFNKKGMADPSDRIEKSKPKFIKLEDLIDKINVINKMLNLLRCDNDTKADLSLIELPKNAGSFVVKKNTIGKSKIILVNQSVTGLYENRREL

SEQ ID NO: 245 - protein, 1130 aa, Streptococcus macedonicus
MTNGKILGLDIGIASVGVGIIEAKTGKVVHANSRLFSAANAENNAERRGFRGSRRLNRRKKHRVKRVRDLFEKYGIVTDFRNLNLNPYELRVKGLTEQLTNEELFAALRTISKRRGISYLDDAEDDSTGSTDYAKSIDENRRLLKTKTPGQIQLERLEKYGQLRGNFTVYDENGEAHRLINVFSTSDYEKEARKILETQADYNKKITAEFIDDYVEILTQKRKYYHGPGNEKSRTDYGRFRTDGTTLENIFGILIGKCNFYPDEYRASKASYTAQEYNFLNDLNNLKVPTETGKLSTEQKESLVEFAKNTAILGPAKLLKEIAKILDCKVDEIKGYREDDKGKPDLHTFEPYRKLKFNLDSVNIDYLSREVLDKLADILTLNTEREGIEDAIKRNLPNQFTEEQISEIINVRKSQSTAFNKGWHSFSAKLMNELIPELYATSDEQMTILTRLEKFKVKKKSSKNIKTIDEKEITDEIYNPVVAKSVRQTIKIINAAVKKYGDFDKIVIEMPRDKNADDEKKFINKRNKENKKEKDDALKRAAYLYNGTDKLPDEVFHGNKQLETKIRLWYQQGERCLYSGKPIPIQELVHNSNNFEIDHILPLSLSFDDSLANKVLVYSWTNQEKGQKTPYQVIDSMDAAWSFREMKEYVLKQKGLGKKKRDYLLTTENIDKIEVKKKFIERNLVDTRYASRVVLNSLQSALRELGKDTKVSVVRGQFTSQLRRKWKIDKSRETYHHHAVDALIIAASSQLKLWEKQDNPMFVDYGNNQVVDKQTGEILSVSDNEYKELVFQPPYQGFVNTISSKGFEDEILFSYQVDSKYNRKVSDATIYSTRKAKIGKDKKEETYVLGKIKDIYSQNGFDTFVKKYNKDKTQFLMYQKDPLTWENVIEVILGDYPTTKKSEDGKNDVKCNPFEEYRRENGLICKYSKKGKGTPIKSLKYYDKKLGNCIDITPEESRNKVILQSINPWRADVYFNPETLKYELMGLKYSDLSFEKGTGNYHISQEKYDAIKEKEGIGKKSEFKFTLYRNDLILIKDIASGEQEIYRFLSRTMPNVNHYVELKPYDKEKFDNVQELVEALGEADKVGRCIKSLNKPNISIYKVRTDVLGNKYFVKKEGDKPKLDFKNNKK

SEQ ID NO: 246 - protein, 1367 aa, Streptococcus pyogenes
MDKKYSIGLDIGTNSVGWAVITDDYKVPSKKFKVLGNTDRHSIKKNLIGALLFGSGETAEATRLKRTARRRYTRRKNRICYLQEIFSNEMAKVDDSFFHRLEESFLVEEDKKHERHPIFGNIVDEVAYHEKYPTIYHLRKKLADSTDKADLRLIYLALAHMIKFRGHFLIEGDLNPDNSDVDKLFIQLVQIYNQLFEENPINASRVDAKAILSARLSKSRRLENLIAQLPGEKRNGLFGNLIALSLGLTPNFKSNFDLAEDAKLQLSKDTYDDDLDNLLAQIGDQYADLFLAAKNLSDAILLSDILRVNSEITKAPLSASMIKRYDEHHQDLTLLKALVRQQLPEKYKEIFFDQSKNGYAGYIDGGASQEEFYKFIKPILEKMDGTEELLVKLNREDLLRKQRTFDNGSIPHQIHLGELHAILRRQEDFYPFLKDNREKIEKILTFRIPYYVGPLARGNSRFAWMTRKSEETITPWNFEEVVDKGASAQSFIERMTNFDKNLPNEKVLPKHSLLYEYFTVYNELTKVKYVTEGMRKPAFLSGEQKKAIVDLLFKTNRKVTVKQLKEDYFKKIECFDSVEISGVEDRFNASLGAYHDLLKIIKDKDFLDNEENEDILEDIVLTLTLFEDRGMIEERLKTYAHLFDDKVMKQLKRRRYTGWGRLSRKLINGIRDKQSGKTILDFLKSDGFANRNFMQLIHDDSLTFKEDIQKAQVSGQGHSLHEQIANLAGSPAIKKGILQTVKIVDELVKVMGHKPENIVIEMARENQTTQKGQKNSRERMKRIEEGIKELGSQILKEHPVENTQLQNEKLYLYYLQNGRDMYVDQELDINRLSDYDVDHIVPQSFIKDDSIDNKVLTRSDKNRGKSDNVPSEEVVKKMKNYWRQLLNAKLITQRKFDNLTKAERGGLSELDKAGFIKRQLVETRQITKHVAQILDSRMNTKYDENDKLIREVKVITLKSKLVSDFRKDFQFYKVREINNYHHAHDAYLNAVVGTALIKKYPKLESEFVYGDYKVYDVRKMIAKSEQEIGKATAKYFFYSNIMNFFKTEITLANGEIRKRPLIETNGETGEIVWDKGRDFATVRKVLSMPQVNIVKKTEVQTGGFSKESILPKRNSDKLIARKKDWDPKKYGGFDSPTVAYSVLVVAKVEKGKSKKLKSVKELLGITIMERSSFEKNPIDFLEAKGYKEVKKDLIIKLPKYSLFELENGRKRMLASAGELQKGNELALPSKYVNFLYLASHYEKLKGSPEDNEQKQLFVEQHKHYLDEIIEQISEFSKRVILADANLDKVLSAYNKHRDKPIREQAENIIHLFTLTNLGAPAAFKYFDTTIDRKRYTSTKEVLDATLIHQSITGLYETRIDLSQLGGD

SEQ ID NO: 247 - protein, 1233 aa, Mycoplasma canis
MEKKRKVTLGFDLGIASVGWAIVDSETNQVYKLGSRLFDAPDTNLERRTQRGTRRLLRRRKYRNQKFYNLVKRTEVFGLSSREAIENRFRELSIKYPNIIELKTKALSQEVCPDEIAWILHDYLKNRGYFYDEKETKEDFDQQTVESMPSYKLNEFYKKYGYFKGALSQPTESEMKDNKDLKEAFFFDFSNKEWLKEINYFFNVQKNILSETFIEEFKKIFSFTRDISKGPGSDNMPSPYGIFGEFGDNGQGGRYEHIWDKNIGKCSIFTNEQRAPKYLPSALIFNFLNELANIRLYSTDKKNIQPLWKLSSVDKLNILLNLFNLPISEKKKKLTSTNINDIVKKESIKSIMISVEDIDMIKDEWAGKEPNVYGVGLSGLNIEESAKENKFKFQDLKILNVLINLLDNVGIKFEFKDRNDIIKNLELLDNLYLFLIYQKESNNKDSSIDLFIAKNESLNIENLKLKLKEFLLGAGNEFENHNSKTHSLSKKAIDEILPKLLDNNEGWNLEAIKNYDEEIKSQIEDNSSLMAKQDKKYLNDNFLKDAILPPNVKVTFQQAILIFNKIIQKFSKDFEIDKVVIELAREMTQDQENDALKGIAKAQKSKKSLVEERLEANNIDKSVFNDKYEKLIYKIFLWISQDFKDPYTGAQISVNEIVNNKVEIDHIIPYSLCFDDSSANKVLVHKQSNQEKSNSLPYEYIKQGHSGWNWDEFTKYVKRVFVNNVDSILSKKERLKKSENLLTASYDGYDKLGFLARNLNDTRYATILFRDQLNNYAEHHLIDNKKMFKVIAMNGAVTSFIRKNMSYDNKLRLKDRSDFSHHAYDAAIIALFSNKTKTLYNLIDPSLNGIISKRSEGYWVIEDRYTGEIKELKKEDWTSIKNNVQARKIAKEIEEYLIDLDDEVFFSRKTKRKTNRQLYNETIYGIATKTDEDGITNYYKKEKFSILDDKDIYLRLLREREKFVINQSNPEVIDQIIEIIESYGKENNIPSRDEAINIKYTKNKINYNLYLKQYMRSLTKSLDQFSEEFINQMIANKTFVLYNPTKNTTRKIKFLRLVNDVKINDIRKNQVINKFNGKNNEPKAFYENINSLGAIVFKNSANNFKTLSINTQIAIFGDKNWDIEDFKTYNMEKIEKYKEIYGIDKTYNFHSFIFPGTILLDKQNKEFYYISSIQTVRDIIEIKFLNKIEFKDENKNQDTSKTPKRLMFGIKSIMNNYEQVDISPFGINKKIFE

SEQ ID NO: 248 - protein, 1375 aa, Lactobacillus johnsonii
MTKIKDDYIVGLDIGTDSCGWVAMNSNNDILKLQGKTAIGSRLFEGGKSAAERRLFRTTHRRIKRRRWRLKLLEEFFDPYMAEVDPYFFARLKESGLSPLDKRKTVSSIVFPTSAEDKKFYDDYPTIYHLRYKLMTEDEKFDLREVYLAIHHIIKYRGNFLYNTSVKDFKASKIDVKSSIEKLNELYENLGLDLNVEFNISNTAEIEKVLKDKQIFKRDKVKKIAELFAIKTDNKEQSKRIKDISKQVANAVLGYKTRFDTIALKEISKDELSDWNFKLSDIDADSKFEALMGNLDENEQAILLTIKELFNEVTLNGIVEDGNTLSESMINKYNDHRDDLKLLKEVIENHIDRKKAKELALAYDLYVNNRHGQLLQAKKKLGKIKPRSKEDFYKVVNKNLDDSRASKEIKKKIELDSFMPKQRTNANGVIPYQLQQLELDKIIENQSKYYPFLKEINPVSSHLKEAPYKLDELIRFRVPYYVGPLISPNESTKDIQTKKNQNFAWMIRKEEGRITPWNFDQKVDRIESANKFIKRMTTKDTYLFGEDVLPANSLLYQKFTVLNELNNIRINGKRISVDLKQEIYENLFKKHTTVTVKKLENYLKENHNLVKVEIKGLADEKKFNSGLTTYNRFKNLNIFDNQIDDLKYRNDFEKIIEWSTIFEDKSIYKEKLRSIDWLNEKQINALSNIRLQGWGRLSKKLLAQLHDHNGQTIIEQLWDSQNNFMQIVTQADFKDAIAKANQNLLVATSVEDILNNAYTSPANKKAIRQVIKVVDDIVKAASGKVPKQIAIEFTRDADENPKRSQTRGSKLQKVYKDLSTELASKTIAEELNEAIKDKKLVQDKYYLYFMQLGRDAYTGEPINIDEIQKYDIDHILPQSFIKDDALDNRVLVSRAVNNGKSDNVPVKLFGNEMAANLGMTIRKMWEEWKNIGLISKTKYNNLLTDPDHINKYKSAGFIRRQLVETSQIIKLVSTILQSRYPNTEIITVKAKYNHYLREKFDLYKSREVNDYHHAIDAYLSAICGNLLYQNYPNLRPFFVYGQYKKFSSDPDKEKAIFNKTRKFSFISQLLKNKSENSKEIAKKLKRAYQFKYMLVSRETETRDQEMFKMTVYPRFSHDTVKAPRNLIPKKMGMSPDIYGGYTNNSDAYMVIVRIDKKKGTEYKILGIPTRELVNLKKAEKEDHYKSYLKEILTPRILYNKNGKRDKKITSFEIVKSKIPYKQVIQDGDKKFMLGSSTYVYNAKQLTLSTESMKAITNNFDKDSDENDALIKAYDEILDKVDKYLPLFDINKFREKLHSGREKFIKLSLEDKKDTILKVLEGLHDNAVMTKIPTIGLSTPLGFMQFPNGVILSENAKLIYQSPTGLFKKSVKISDL

SEQ ID NO: 249 - protein, 1053 aa, Staphylococcus aureus
MKRNYILGLDIGITSVGYGIIDYETRDVIDAGVRLFKEANVENNEGRRSKRGARRLKRRRRHRIQRVKKLLFDYNLLTDHSELSGINPYEARVKGLSQKLSEEEFSAALLHLAKRRGVHNVNEVEEDTGNELSTKEQISRNSKALEEKYVAELQLERLKKDGEVRGSINRFKTSDYVKEAKQLLKVQKAYHQLDQSFIDTYIDLLETRRTYYEGPGEGSPFGWKDIKEWYEMLMGHCTYFPEELRSVKYAYNADLYNALNDLNNLVITRDENEKLEYYEKFQIIENVFKQKKKPTLKQIAKEILVNEEDIKGYRVTSTGKPEFTNLKVYHDIKDITARKEIIENAELLDQIAKILTIYQSSEDIQEELTNLNSELTQEEIEQISNLKGYTGTHNLSLKAINLILDELWHTNDNQIAIFNRLKLVPKKVDLSQQKEIPTTLVDDFILSPVVKRSFIQSIKVINAIIKKYGLPNDIIIELAREKNSKDAQKMINEMQKRNRQTNERIEEIIRTTGKENAKYLIEKIKLHDMQEGKCLYSLEAIPLEDLLNNPFNYEVDHIIPRSVSFDNSFNNKVLVKQEENSKKGNRTPFQYLSSSDSKISYETFKKHILNLAKGKGRISKTKKEYLLEERDINRFSVQKDFINRNLVDTRYATRGLMNLLRSYFRVNNLDVKVKSINGGFTSFLRRKWKFKKERNKGYKHHAEDALIIANADFIFKEWKKLDKAKKVMENQMFEEKQAESMPEIETEQEYKEIFITPHQIKHIKDFKDYKYSHRVDKKPNRELINDTLYSTRKDDKGNTLIVNNLNGLYDKDNDKLKKLINKSPEKLLMYHHDPQTYQKLKLIMEQYGDEKNPLYKYYEETGNYLTKYSKKDNGPVIKKIKYYGNKLNAHLDITDDYPNSRNKVVKLSLKPYRFDVYLDNGVYKFVTVKNLDVIKKENYYEVNSKCYEEAKKLKKISNQAEFIASFYNNDLIKINGELYRVIGVNNDLLNRIEVNMIDITYREYLENMNDKRPPRIIKTIASKTQSIKKYSTDILGNLYEVKSKKHPQIIKKG

SEQ ID NO: 250 - protein, 1063 aa, Simonsiella muelleri
MEKFHYVLGLDLGIASVGWAAIEIDKETETSIGLLDCGVRTFERAEVPKTGDSLAKARREARSTRRLIRRRSHRLLRLKRLLKREIFRQPETFKDLPINAWQLRVKGLDSRLNEYEWAAVLLHLVKHRGYLSQRKSEMSETDSKSEMGRLLAGVAENHQLLQQEQYRTPAELALKKFVKHFRNKGGDYAHTFNRLDLQAELHLLFQKQRELGNPFTSPELERQVDDLLMTQRSALQGDAILKMLGHCGFEPEQFKAAKNTFSAERFIWLTKLNNLRIQDQGKERALTADERTKLLDEPYKKSKLTYAQVRKLLSLPQTAIFKGLRYDLEHDKKAENSTLMEMKSYHNIRQTLEKSGLKTEWQSIATQPEILDAIGTAFSIYKTDEDISHELKTCRLPENVLNELLKNINFDGFIQLSLTALRKILPLMEQGYRYDEACTQIYGNHHSGSLQQESKQFLPHIPIDDVRNPVVFRTLTQARKVVNAIIRRYGSPARVHIEMARELGKSKSDRDRIEKQQQKNKKERENAVAKFKEDFPDFVGEPRGKDILKMRLYEQQHGKCLYSGHDIDINRLNEKGYVEIDHALPFSRTWDDSQNNKVLVLGSENQNKRNQTPDEYLDGANNSQRWLEFQARVQTCHFSYGKKQRIQLAKLDDETEKGFLERNLNDTRYIARFMCQFVQENLYLTGKGKRLVFASNGGMTATLRNLWGLRKVREDNDRHHALDAIVVACSTASMQQKITKAFQRHESIEYVDTETGEVKFRIPQPWDFFRQEVMIRVFSDQPCEDLVEKLSARPEALHDNVTPLFVSRAPNRKMSGQGHLETIKSAKRLSEENSMVKKPLTTLKLKDIPEIVGYPSREPQLYAALKTRLETHDDDPIKAFAKPFYKPNKNGELGALVRSVRVKGVQNTGVMVHDGKGIADNATMVRVDVYTKAGKNYLVPVYVWQVAQGILPNRAVTSGKSEADWDLIDESFEFKFSLSRGDLVEMISNKGRIFGYYNGLDRANGSIGIREHDLEKSKGKDGVHRVGVKTATAFNKYHVDPLGKEIHRCSSEPRPTLKIKSKK

SEQ ID NO: 251 - protein, 1509 aa, Psychroflexus torquis
MKRILGLDLGTNSIGWSLIEHDFKNKQGQIEGLGVRIIPMSQEILGKFDAGQSISQTADRTKYRGVRRLYQRDNLRRERLHRVLKILDFLPKHYSESIDFQDKVGQFKPKQEVKLNYRKNEKNKHEFVFMNSFIEMVSEFKNAQPELFYNKGNGEETKIPYDWTLYYLRKKALTQQITKEELAWLILNFNQKRGYYQLRGEDIDEDKNKKYMQLKVNNLIDSGAKVKGKVLYNVIFDNGWKYEKQIVNKDEWEGRTKEFIITTKTLKNGNIKRTYKAVDSEIDWAAIKAKTEQDINKANKTVGEYIYESLLDNPSQKIRGKLVKTIERKFYKEEFEKLLSKQIELQPELFNESLYKACIKELYPRNENHQSNNKKQGFEYLFTEDIIFYQRPLKSQKSNISGCQFEHKIYKQKNKKTGKLELIKEPIKTISRSHPLFQEFRIWQWLQNLKIYNKEKIENGKLEDVTTQLLPNNEAYVTLFDFLNTKKELEQKQFIEYFVKKKLIDKKEKEHFRWNFVEDKKYPFSETRAQFLSRLAKVKGIKNTEDFLNKNTQVGSKENSPFIKRIEQLWHIIYSVSDLKEYEKALEKFAEKHNLEKDSFLKNFKKFPPFVSDYASYSKKAISKLLPIMRMGKYWSESAVPTQVKERSLSIMERVKVLPLKEGYSDKDLADLLSRVSDDDIPKQLIKSFISFKDKNPLKGLNTYQANYLVYGRHSETGDIQHWKTPEDIDRYLNNFKQHSLRNPIVEQVVMETLRVVRDIWEHYGNNEKDFFKEIHVELGREMKSPAGKREKLSQRNTENENTNHRIREVLKELMNDASVEGGVRDYSPSQQEILKLYEEGIYQNPNTNYLKVDEDEILKIRKKNNPTQKEIQRYKLWLEQGYISPYTGKIIPLTKLFTHEYQIEHIIPQSRYYDNSLGNKIICESEVNEDKDNKTAYEYLKVEKGSIVFGHKLLNLDEYEAHVNKYFKKNKTKLKNLLSEDIPEGFINRQLNDSRYISKLVKGLLSNIVRENGEQEATSKNLIPVTGVVTSKLKQDWGLNDKWNEIIAPRFKRLNKLTNSNDFGFWDNDINAFRIQVPDSLIKGFSKKRIDHRHHALDALVVACTSRNHTHYLSALNAENKNYSLRDKLVIKNENGDYTKTFQIPWQGFTIEAKNNLEKTVVSFKKNLRVINKTNNKFWSYKDENGNLNLGKDGKPKKKLRKQTKGYNWAIRKPLHKETVSGIYNINAPKNKIATSVRTLLTEIKNEKHLAKITDLRIRETILPNHLKHYLNNKGEANFSEAFSQGGIEDLNKKITTLNEGKKHQPIYRVKIFEVGSKFSISEDENSAKSKKYVEAAKGTNLFFAIYLDEENKKRNYETIPLNEVITHQKQVAGFPKSERLSVQPDSQKGTFLFTLSPNDLVYVPNNEELENRDLFNLGNLNVEQISRIYKFTDSSDKTCNFIPFQVSKLIFNLKKKEQKKLDVDFIIQNEFGLGSPQSKNQKSIDDVMIKEKCIKLKIDRLGNISKA

SEQ ID NO: 252 - protein, 1112 aa, Staphylococcus simulans
MLVGLKFKQSILFENMENAEDIKESATGSDAISLSDDYYENLSEFLTDEQLNFIESANTFFMGIMLDRILKGATSISAAKVRDYKIFKSQLKLIKDIVYQNKYDKYHEFFVTSKEDMRAYQENPDAKNFGKLSKFDQYLIHSKDQYAKLMKDLKGLVPKEYTEVLNLIDEQKFLVVQNTTDNASIPYQNNVFEAENILRNQQKYYPEITEEMIGKVINLISFRIPYYVGPLTNKNGQSDFAWMIRKSDEQTLPWNFDKVIDKSKSAEKFIRRMTSKCTYLLEEDVLPKHSLLYQEMEVLNELNNVQLRGENEPKHRIHRLDPKVKQFIYHNLFQKKKNVTHKDLITLLQNSEHRNTLNKTSGQKLKVFGTQNDSKFASKLSTYNDMKAILGSVENKRQMIEELVLWITIFEDKAILKQKIGEKYPNITEKQLNQIVKLNYSGWGRLSEKLLTKEVNGRSLIDLMYSTENNFMEIITDKTLGFDCFIKNSNKVKNAKISYKDVAELRTSPALKKGIWNAIKMVREISNLFGAPEKIIIEFATEDQAKGKRQKSRSELWDDLVKKNNLKRNKEFEGLFEELKAYPDLDFSNPKLWLYIHQNGKCMYTKKPIDLERLMSDTNNQLYEIDHILPRTFVKDDSINNKVLVIQSANQKKSGDKMPLEIFDNHVLVPFWKMLYENDLISSSKLSKLMKKEFNDLDKEGFIQRQLVETRQIISHVSDFLTEEYPSTTVVPMKANVVSELRRKFDIPKIRQLNDWHHAVDAYLNGFVYQAARVFYPKVNLFEFNFKWEKVREKWRQLGEFTENNKKREFFLFKRMENYVNEYGEGMISKLIFDLDNFKFNYSRKVESTESAFYKQSAFSPKNTTAQYDSDKNKTAIYKEMKNKRGIVVSYTYVKKDQELIGYGVFNETVFEYVNNADVDMNTRALKIVRKAFPKLDIKKAQYLFSINKGDALLVNGHPFLFVSAYERINGKQLEFDIAMQRKIKQALSPYNNMTEQEKVEFYNQFAEKVIEEFRNSIGLQSRDRKVNLIKNLFNNTEKSNDSMTQSILEVLKMTKVSAERSKELKIRWNGQTPNTFIDTKNNAEIQYKSITGLKTTKPKSIFKLAESKNEL

SEQ ID NO: 253 - protein, 1274 aa, Mycoplasma gallisept
MNINMNNSIKSKPEVTIGLDLGVGSVGWAIVDNETNIIHHLGSRLFSQAKTAEDRRSFRGVRRLIRRRKYKLKRFVNLIWKYNSYFGFKNKEDILNNYQEQQKLHNTVLNLKLEALNAKIDPKALSWILHDYLKNRGHFYEDNRDFNVYPTEELANYFDEFGYYKGIIDSKNDDDDKLEEGLTKYKFSNQHWLEEVKKVLSNQTGLPEKFKEEYESLFSYVRNYSEGPGSINSVSPYGIYHLDEKEGKVVQKYNNIWDKTIGKCSIFPDEYRAPKNSPIAMIFNEINELSTIRSYSIYLTGWFINQEFKKAYLNKLLDLLIKTNSEKPIDARQFKKLREETIAESIGKETLKDVESEEKLEKDDHKWKLKGLKLNTNGKIQYNDLSSLAKFVHKLKQHLKLDFLLEDQYTPLDKINFLQSLYVYLGKHLRYSNRVDSANLKEFSDSSRLFERVLQEQKDGLFKLFEQTDKDDEKILTQTHSLSTKAMLLAITRMTNLDNDEDNQKNNDKGWNFEAIKNFDQKFIDITKTNNNLSLKQDKRYLDDQFINDAILSPGVKRILREATKVFNAILKQFSEEYDVTKVVIELARELSEEKELENTKNYKKLIKKNGDKISEGLKALGIAEDKIEEILKSPTKSYKVLLWLQQDHIDPYSQKEIAFDDILTKTEKTEIDHIIPYSISFDDSSSNKLLVLAESNQAKSNQTPYEFINSGKAEITWEVYEAYCHKFKNGDSSLLDSTQRSKKFAKMMKTDTSSKYDIGFLARNLNDTRYATIVFRDALKDYANNHLVEDKPMFKVVCINGGVTSFLRKNFDPKSWYAKKDRDKNIHHAVDASIISIFSNETKTLFNQLTKFADYKLFKNTDGSWKKIDPKTGVVSEVTDENWKQIRVRNQVSEIAKVIDKYIQDSNIERKARYSRKIENKTNISLFNDTVYSAKKVGYEDQIKRKNLKTLDIHESAEENKNSKVKKQFVYRKLVNVSLLNNDKLADLFAEKEDILMYRANPWVINLAEQIFNEYTENKKIKSQNVFEKYMLDLTKEFPEKFSEAFVKSMIRNKTAIIYNVEKDVVHRIKRLKILSSELKENKWSNVIIRSKNESGTKLSYQDTINSIALMIMRSIDPTAKKQYIRVPLNTLNLHLGDQDFDLHNIDAYLKKPKFVKYLKANEIGDEYKPWRVLTSGTLLIHKKDKKLMYISSFQNLNDLIEIKNLIETEYKENVDSDPKKKKKASQILRSLSVILNDYILLDAKYNFDILGLSKNKIDEILNSKLDLDKIAK

SEQ ID NO: 254 - protein, 1122 aa, Artificial Sequence; identical to SEQ ID NO: 23
  Synthetic sequence

SEQ ID NO: 255 - protein, 1236 aa, Artificial Sequence; identical to SEQ ID NO: 21
  Synthetic sequence

SEQ ID NO: 256 - protein, 1059 aa, Artificial Sequence; identical to SEQ ID NO: 15
  Synthetic sequence

SEQ ID NO: 257 - protein, 1166 aa, Artificial Sequence; identical to SEQ ID NO: 39
  Synthetic sequence

SEQ ID NO: 258 - protein, 1149 aa, Artificial Sequence; identical to SEQ ID NO: 37
  Synthetic sequence

SEQ ID NO: 259 - protein, 1314 aa, Artificial Sequence; identical to SEQ ID NO: 27
  Synthetic sequence

SEQ ID NO: 260 - protein, 1064 aa, Artificial Sequence; identical to SEQ ID NO: 38
  Synthetic sequence

SEQ ID NO: 261 - protein, 1401 aa, Artificial Sequence
  Synthetic sequence
MDKKYSIGLDIGTNSVGWAVITDEYKVPSKKFKVLGNTDRHSIKKNLIGALLFDSGETAEATRLKRTARRRYTRRKNRICYLQEIFSNEMAKVDDSFFHRLEESFLVEEDKKHERHPIFGNIVDEVAYHEKYPTIYHLRKKLVDSTDKADLRLIYLALAHMIKFRGHFLIEGDLNPDNSDVDKLFIQLVQTYNQLFEENPINASGVDAKAILSARLSKSRRLENLIAQLPGEKKNGLFGNLIALSLGLTPNFKSNFDLAEDAKLQLSKDTYDDDLDNLLAQIGDQYADLFLAAKNLSDAILLSDILRVNTEITKAPLSASMIKRYDEHHQDLTLLKALVRQQLPEKYKEIFFDQSKNGYAGYIDGGASQEEFYKFIKPILEKMDGTEELLVKLNREDLLRKQRTFDNGSIPHQIHLGELHAILRRQEDFYPFLKDNREKIEKILTFRIPYYVGPLARGNSRFAWMTRKSEETITPWNFEEVVDKGASAQSFIERMTNFDKNLPNEKVLPKHSLLYEYFTVYNELTKVKYVTEGMRKPAFLSGEQKKAIVDLLFKTNRKVTVKQLKEDYFKKIECFDSVEISGVEDRFNASLGTYHDLLKIIKDKDFLDNEENEDILEDIVLTLTLFEDREMIEERLKTYAHLFDDKVMKQLKRRRYTGWGRLSRKLINGIRDKQSGKTILDFLKSDGFANRNFMQLIHDDSLTFKEDIQKAQVSGQGDSLHEHIANLAGSPAIKKGILQTVKVVDELVKVMGRHKPENIVIEMARENQTTQKGQKNSRERMKRIEEGIKELGSQILKEHPVENTQLQNEKLYLYYLQNGRDMYVDQELDINRLSDYDVDHIVPQSFLKDDSIDNKVLTRSDKNRGKSDNVPSEEVVKKMKNYWRQLLNAKLITQRKFDNLTKAERGGLSELDKAGFIKRQLVETRQITKHVAQILDSRMNTKYDENDKLIREVKVITLKSKLVSDFRKDFQFYKVREINNYHHAHDAYLNAVVGTALIKKYPKLESEFVYGDYKVYDVRKMIAKSEQEIGKATAKYFFYSNIMNFFKTEITLANGEIRKRPLIETNGETGEIVWDKGRDFATVRKVLSMPQVNIVKKTEVQTGGFSKESILPKRNSDKLIARKKDWDPKKYGGFDSPTVAYSVLVVAKVEKGKSKKLKSVKELLGITIMERSSFEKNPIDFLEAKGYKEVKKDLIIKLPKYSLFELENGRKRMLASAGELQKGNELALPSKYVNFLYLASHYEKLKGSPEDNEQKQLFVEQHKHYLDEIIEQISEFSKRVILADANLDKVLSAYNKHRDKPIREQAENIIHLFTLTNLGAPAAFKYFDTTIDRKRYTSTKEVLDATLIHQSITGLYETRIDLSQLGGDAYPYDVPDYASLGSGSPKKKRKVEDPKKKRKVD

SEQ ID NO: 262 - protein, 1368 aa, Artificial Sequence
  Synthetic sequence
MDKKYSIGLAIGTNSVGWAVITDDYKVPSKKLKGLGNTDRHGIKKNLIGALLFDSGETAEATRLKRTARRRYTRRKNRICYLQEIFSNEMAKVDDSFFHRLEESFLVEEDKKHERHPIFGNIVDEVAYHEKYPTIYHLRKKLADSTDKVDLRLIYLALAHMIKFRGHFLIEGDLNPDNSDVDKLFIQLVQTYNQLFEENPINASRVDAKAILSARLSKSRRLENLIAQLPGEKKNGLFGNLIALSLGLTPNFKSNFDLAEDAKLQLSKDTYDDDLDNLLAQIGDQYADLFLAAKNLSDATLLSDILRVNSEITKAPLSASMIKRYDEHHQDLTLLKALVRQQLPEKYKEIFFDQSKNGYAGYIDGGASQEEFYKFIKPILEKMDGTEELLAKLNREDLLRKQRTFDNGSIPYQIHLGELHAILRRQEDFYPFLKDNREKIEKILTFRIPYYVGPLARGNSRFAWMTRKSEETITPWNFEEVVDKGASAQSFIERMTNFDKNLPNEKVLPKHSLLYEYFTVYNELTKVKYVTEGMRKPAFLSGEQKKAIVDLLFKTNRKVTVKQLKEDYFKKIECFDSVEISGVEDRFNASLGTYHDLLKIIKDKDFLDNEENEDILEDIVLTLTLFEDREMIEERLKTYAHLFDDKVMKQLKRRRYTGWGRLSRKLINGIRDKQSGKTILDFLKSDGFANRNFMQLIHDDSLTFKEDIQKAQVSGQGDSLHEHIANLAGSPAIKKGILQTVKVVDELVKVMGRHKPENIVIEMARENQTTQKGQKNSRERMKRIEEGIKELGSDILKEYPVENTQLQNEKLYLYYLQNGRDMYVDQELDINRLSDYDVDHIVPQSFLKDDSIDNKVLTRSDKNRGKSDNVPSEEVVKKMKNYWRQLLNAKLITQRKFDNLTKAERGGLSELDKVGFIKRQLVETRQITKHVAQILDSRMNTKYDENDKLIREVRVITLKSKLVSDFRKDFQFYKVREINNYHHAHDAYLNAVVGTALIKKYPKLESEFVYGDYKVYDVRKMIAKSEQEIGKATAKYFFYSNIMNFFKTEITLANGEIRKRPLIETNGETGEIVWDKGRDFATVRKVLSMPQVNIVKKTEVQTGGFSKESILPKRNSDKLIARKKDWDPKKYGGFDSPTVAYSVLVVAKVEKGKSKKLKSVKELLGITIMERSSFEKDPIDFLEAKGYKEVRKDLIIKLPKYSLFELENGRKRMLASAGELQKGNELALPSKYVNFLYLASHYEKLKGSPEDNEQKQLFVEQHKHYLDEIIEQISEFSKRVILADANLDKVLSAYNKHRDKPIREQAENIIHLFTLTNLGAPAAFKYFDTTIDRKRYTSTKEVLDATLIHQSITGLYETRIDLSQLGGD

SEQ ID NO: 263 - protein, 1368 aa, Artificial Sequence
  Synthetic sequence
MDKKYSIGLDIGTNSVGWAVITDDYKVPSKKLKGLGNTDRHGIKKNLIGALLFDSGETAEATRLKRTARRRYTRRKNRICYLQEIFSNEMAKVDDSFFHRLEESFLVEEDKKHERHPIFGNIVDEVAYHEKYPTIYHLRKKLADSTDKVDLRLIYLALAHMIKFRGHFLIEGDLNPDNSDVDKLFIQLVQTYNQLFEENPINASRVDAKAILSARLSKSRRLENLIAQLPGEKKNGLFGNLIALSLGLTPNFKSNFDLAEDAKLQLSKDTYDDDLDNLLAQIGDQYADLFLAAKNLSDATLLSDILRVNSEITKAPLSASMIKRYDEHHQDLTLLKALVRQQLPEKYKEIFFDQSKNGYAGYIDGGASQEEFYKFIKPILEKMDGTEELLAKLNREDLLRKQRTFDNGSIPYQIHLGELHAILRRQEDFYPFLKDNREKIEKILTFRIPYYVGPLARGNSRFAWMTRKSEETITPWNFEEVVDKGASAQSFIERMTNFDKNLPNEKVLPKHSLLYEYFTVYNELTKVKYVTEGMRKPAFLSGEQKKAIVDLLFKTNRKVTVKQLKEDYFKKIECFDSVEISGVEDRFNASLGTYHDLLKIIKDKDFLDNEENEDILEDIVLTLTLFEDREMIEERLKTYAHLFDDKVMKQLKRRRYTGWGRLSRKLINGIRDKQSGKTILDFLKSDGFANRNFMQLIHDDSLTFKEDIQKAQVSGQGDSLHEHIANLAGSPAIKKGILQTVKVVDELVKVMGRHKPENIVIEMARENQTTQKGQKNSRERMKRIEEGIKELGSDILKEYPVENTQLQNEKLYLYYLQNGRDMYVDQELDINRLSDYDVDAIVPQSFLKDDSIDNKVLTRSDKNRGKSDNVPSEEVVKKMKNYWRQLLNAKLITQRKFDNLTKAERGGLSELDKVGFIKRQLVETRQITKHVAQILDSRMNTKYDENDKLIREVRVITLKSKLVSDFRKDFQFYKVREINNYHHAHDAYLNAVVGTALIKKYPKLESEFVYGDYKVYDVRKMIAKSEQEIGKATAKYFFYSNIMNFFKTEITLANGEIRKRPLIETNGETGEIVWDKGRDFATVRKVLSMPQVNIVKKTEVQTGGFSKESILPKRNSDKLIARKKDWDPKKYGGFDSPTVAYSVLVVAKVEKGKSKKLKSVKELLGITIMERSSFEKDPIDFLEAKGYKEVRKDLIIKLPKYSLFELENGRKRMLASAGELQKGNELALPSKYVNFLYLASHYEKLKGSPEDNEQKQLFVEQHKHYLDEIIEQISEFSKRVILADANLDKVLSAYNKHRDKPIREQAENIIHLFTLTNLGAPAAFKYFDTTIDRKRYTSTKEVLDATLIHQSITGLYETRIDLSQLGGD

SEQ ID NO: 264 - protein, 1368 aa, Artificial Sequence
  Synthetic sequence
MDKKYSIGLAIGTNSVGWAVITDDYKVPSKKLKGLGNTDRHGIKKNLIGALLFDSGETAEATRLKRTARRRYTRRKNRICYLQEIFSNEMAKVDDSFFHRLEESFLVEEDKKHERHPIFGNIVDEVAYHEKYPTIYHLRKKLADSTDKVDLRLIYLALAHMIKFRGHFLIEGDLNPDNSDVDKLFIQLVQTYNQLFEENPINASRVDAKAILSARLSKSRRLENLIAQLPGEKKNGLFGNLIALSLGLTPNFKSNFDLAEDAKLQLSKDTYDDDLDNLLAQIGDQYADLFLAAKNLSDATLLSDILRVNSEITKAPLSASMIKRYDEHHQDLTLLKALVRQQLPEKYKEIFFDQSKNGYAGYIDGGASQEEFYKFIKPILEKMDGTEELLAKLNREDLLRKQRTFDNGSIPYQIHLGELHAILRRQEDFYPFLKDNREKIEKILTFRIPYYVGPLARGNSRFAWMTRKSEETITPWNFEEVVDKGASAQSFIERMTNFDKNLPNEKVLPKHSLLYEYFTVYNELTKVKYVTEGMRKPAFLSGEQKKAIVDLLFKTNRKVTVKQLKEDYFKKIECFDSVEISGVEDRFNASLGTYHDLLKIIKDKDFLDNEENEDILEDIVLTLTLFEDREMIEERLKTYAHLFDDKVMKQLKRRRYTGWGRLSRKLINGIRDKQSGKTILDFLKSDGFANRNFMQLIHDDSLTFKEDIQKAQVSGQGDSLHEHIANLAGSPAIKKGILQTVKVVDELVKVMGRHKPENIVIEMARENQTTQKGQKNSRERMKRIEEGIKELGSDILKEYPVENTQLQNEKLYLYYLQNGRDMYVDQELDINRLSDYDVDAIVPQSFLKDDSIDNKVLTRSDKNRGKSDNVPSEEVVKKMKNYWRQLLNAKLITQRKFDNLTKAERGGLSELDKVGFIKRQLVETRQITKHVAQILDSRMNTKYDENDKLIREVRVITLKSKLVSDFRKDFQFYKVREINNYHHAHDAYLNAVVGTALIKKYPKLESEFVYGDYKVYDVRKMIAKSEQEIGKATAKYFFYSNIMNFFKTEITLANGEIRKRPLIETNGETGEIVWDKGRDFATVRKVLSMPQVNIVKKTEVQTGGFSKESILPKRNSDKLIARKKDWDPKKYGGFDSPTVAYSVLVVAKVEKGKSKKLKSVKELLGITIMERSSFEKDPIDFLEAKGYKEVRKDLIIKLPKYSLFELENGRKRMLASAGELQKGNELALPSKYVNFLYLASHYEKLKGSPEDNEQKQLFVEQHKHYLDEIIEQISEFSKRVILADANLDKVLSAYNKHRDKPIREQAENIIHLFTLTNLGAPAAFKYFDTTIDRKRYTSTKEVLDATLIHQSITGLYETRIDLSQLGGD

SEQ ID NO: 265 - protein, 240 aa, Acetobacter aceti
MANIAENLVFGIDLGIGSCGWAVLNQKAKDENIVALGSWCFDVPETDKERIPTNQIRRANRLLRRVIRRRRNRMAEIRRLFASKGMLDTADPDALAKISADPWEMRAKGLDYQLTPQEFAVALGHIAKRRGFKSAAKRVSTNAPSEDSKMLAALEKTKEQSAQYRTIGEMFARDPAYADRRRNRDGCFDRTMSREDLFKETQILFESQRRLGNFSATSETEQAFIDIAFRQKPMQDSERL

SEQ ID NO: 266 - protein, 400 aa, Acetobacter aceti
SFERFRLLCRLVNLRVTDGLEDRPLTPEELRLACEDAGKTRKLSVKKVRSLIGLRDDQRFTTIPPDQEQHDIAARTGDALTGTATFRAILGESFWRQLLPHPEQLDRAAWIISFHELTDTIISKLATIGLPSEVMELIRKALEDGKFSKFKGAASLSDKAARKLIPFLQEGLTYDKACQKAGYNHAASKFTHYDSIDTKAKFNSLMDDVRDSITNPVARKAISEGMKQVWAMRNQWGLPGAICIELARDVGNSAEKRREIESGIKKNTAQRERERQEAKEHLNQSDISSETLLRYRLWKEQGGRCCYTDQPITPSQLIASDNSVQVDHILPWSRFGDDSYLNKALCTAKANQEKKNRTPWEWIHNQKGVEAWNHFTAAVESRKETRGLKKRNFLLKSSKE

SEQ ID NO: 267 - protein, 376 aa, Acetobacter aceti
YAARVMAEAVRLLYPSGNRAEKGGVKRVFTRPGALTAALRHAWGVESLKKINGKRLNDDRHHALDAAVVAAVSEKEIQKLTKSFQICEQKGLARPMRDVPMPWEGFRHQLETAYADIRVARPERRRARGKGHDATIRQLREEKDGPVVYERRAISDLKLTDLERIKDPERNSAIISSLRTWIEKGKPADYPPQSPKGDEIRKIRVMSRNKPAVSVRGGTADRGEMTRVDVFTKMGKKGKPEWFLVPIYRHQVIDRIQWPQPPNQAAANGKSEKNWPTMGLEHEFRFSLYPRSYVQIVKRDGEIIEGYFAGLDRTVAAFSLLSSSDPTSIQRGIGAKTLESIRKYNVNRFGDISMVEQETRTWHGDVCISPDQPDSA

SEQ ID NO: 268 - protein, 1054 aa, Actinobacillus suis
MKLTPLNYILGLDLGIASVGWAVVEIDEQENPLGLIDVGVRTFDRAEVPKTGESLALARRLARSARRLVKRRADRIKKAKRLLKAENILLSADEHLPNDVWQLRVKGLDQKLERQEWAAVLLHLLKHRGYLSQRKNESKSENKELGALLSGVETNHQILQSAEYRTPAEIAVKKFHVEDGHIRNQRGAYTHTFSRLDLLAEMELLFQRQTDLGNPHTSAKLLENLTALLMWQKPALAGEAILKMLGKCTFEPTEYKAAKNSYSAERFVWLTKLNNLRILEQGAERALTDNERFALLDQPYEKAKFTYAQARTMLALPDEAIFKGVRYQGEDKKAVETKTILMEMKAYHQIRKALENADLKAEWNELKNNSELLDDIGTAFSLHKTDEDICRYLDGKLSESILNALLENLNFDKFIQLSLKALQQILPLMLQGQRYDEAVSAIYGDHYGKKSAEINRLLPTIPADEIRNPVVLRTLTQARKVINAVVRLYGSPARIHIETGREVGKSYQDRKKLEKQQEDNRKQRESAVKKFKEYFPNFVGEPKGKDILKMRLYELQQAKCLYSGKSLELHRLLEKGYVEVDHALPFSRTWDDSFNNKVLVLANENQNKGNLTPYEWLDGKNNSEHWQNFVARVQTSGFSHTKKQRILSHKLDEKGFIERNLNDTRYVARFLCNFIADNMLLTGKGKRKVFASNGQITALLRGRWGLQKVRDDNDRHHALDAVVVACSTVVMQQKITRFVRYEEGNVFSGERIDRETGEIIPLHFPSPWAFFRENVEIRIFSENPKLELENRLPDYPQYNHEFVQPLFVSRMPTRKMTGQGHMETVKSAKRLDEGLSVLKVPLTQLKLSDLERMVNREREVTLYESLKARLEQFGNDPAKAFAEPFHKKGGAVVKAVRVEQTQKSGVLVRDGNGVADNASMVRVDVFTKGGKYFLVPIYTWQVAKGILPNKAVTANVDEIDWLEMDESYQFIFTMYPNDLVKVKLKKEEFFGYYGGLDRATGAIVIKEHDLEKSKGKQGIYRIGVKLALSFEKYQVDELGKNIRPCRPTKRQHVR

SEQ ID NO: 269 - protein, 239 aa, Actinobacillus ureae
MEIRIFSENPKLGLENRLPGYPQYNHEFVQPLFVSRMPTRKMTGKGHMETVKSAKRLDEGLSVLKVPLTQLKLSDLERMVNREREDALYQSLKAHLEQFGNDPAKAFAEPFHKKGGTVVKAVRVEQTQKSGVLVRDGNGVADNTSMVRVDVFTKAGKYFLVPIYKWQVAKRILPNKAVTAGVDEIDWLEMDSSYQFIFTMYANDLVKVKLKKRSILGLLRWFRSCNWGYCYQRTRFREI

SEQ ID NO: 270 - protein, 400 aa, Actinobacillus ureae
MKLTPLNYILGLDLGIASVGWAVVEIDEQENPLGLIDVGVRTFDRAEVAKTGESLALARRLARSSRRLVKRRADRIKKAKRLLKAENLLLSADEILPNDVWQLRVKGLDQKLERQEWAAVLLHILKHRGYLSQRKNESKSENKELGALLSGVATNHQLLQTAEYRTPAEITVKKFQAEENGHGHIRNQRGDYSHTFDRKDLLAEMKLLFQRQAELGNPHTSEKLLENLTTLLLWQKPALAGEAILKMLGKCTFEPAEYKAAKNSYSAERFVWLTKLNNLRILENGIERALTDNERFTLLDQPYEKAKLTYAQARTMLALSDEAIFKGVRYQGEDKKAAEKVALIEMKGYQHIRKALEGAGLKAEWNELKNNSELLDDIGTAFSLYFSISNLPTEIAYFTP

SEQ ID NO: 271 - protein, 1113 aa, Actinomyces georgiae
MSASSQNVERIRYKVGIDVGLRSIGFCAVQVDADDRPVKLLNTVVHVHDAGVSPADAKKADTRKLVSGVARRTRRLYRTRKRRLVDLDRQLDGLGWPLVDPARFADPREPWFAREKLVSGRVDDADERKELLSVALRHIAHHRGWRNPYSTVESLQADAPPSEFLQGLNQRVSEKLGTELDPGLTQGQLVAKLLHRFPNAKIRGPEGILRGKLHQSDNAGELRLICRTQGLDCHITEELVRLVFQAKSPKANKEMRKRIGRDQLPGQGAHIRAEKAHPVFQRFRIVAVLANLRIREAHVDRRLTAEEMRTLTDFLLGLAGSEQPTWEELADNLNIERHQLRGTAKASVDGAPALRFPPIDATTDRIYASKLKWLAEWWRQADEERRGYMVDALSNSGGSEDEPYLDDEIAEMLEQASEEDQAKLDSLHLPGGRASYCLDTLRRLTDAMLGGGLDLFEARKAVFHVDDDWAPPTDPIGAPVGNPPVDRVLKHVARWLEAATGRWGAPQTINIEHVREGLGSEKAARELTRMNDRRRRNNQKLVEEMGEKLGMSGRIRRSDRMRYEAIRRQNCECLYCGQPITYQTMEMDHIVPRAGAASTNSRSNLAAVCRRCNHQKGKLPFAVWAESQDSPAEVRLQDAVQRVRHWLRDAGMGQKELQALRVQVIARLKSKRPDEEFDGRSMESIAWMANELRARVEAQYRGSGTTVRVYRGALTAEARKASGFEGRVNLIGGRGKDRFDRRHHAMDALVIALMNQSVAQTLALRLNMRDSQWLTQSEQTWRQFHGAPGEAARKWEAWDRDMRDASDLFNLALDGGRIPITENVRLRVGNGRVHEDGVIRFKPEYEVKGKTIKGGEARLLGDSLPSEQIDRAETPALWTALTRLPEYDRKSGLPENPDRVIRVNGAVVQATDRIRFFGTPASVAVRGGYAKLGESIHHARIYRINGKTPKYAMIRVYTIDLMRLNHEDIFTAVLKPSTISMRCAEKKLKYAIAEGNAEQIGWLVEGDQLELDAAAYAKGVGADLMREYPMATCWRVAGFPDEAKLRLRPVLLAAEGMGEDAPKFMREVLENQGWRPAVNALLSPGSVRVVRRNVLGEPRFKSSGHLPTTVDLV

SEQ ID NO: 272 - protein, 1101 aa, Actinomyces naeslundii
MWYASLMSAHHLRVGIDVGTHSVGLATLRVDDHGTPIELLSALSHIHDSGVGKEGKKDHDTRKKLSGIARRARRLLHHRRTQLQQLDEVLRDLGFPIPTPGEFLDLNEQTDPYRVWRVRARLVEEKLPEELRGPAISMAVRHIARHRGWRNPYSKVESLLSPAEESPFMKALRERILATTGEVLDDGITPGQAMAQVALTHNISMRGPEGILGKLHQSDNANEIRKICARQGVSPDVCKQLLRAVFKADSPRGSAVSRVAPDPLPGQGSFRRAPKCDPEFQRFRIISIVANLRISETKGENRPLTADERRHVVTFLTEDSQADLTWVDVAEKLGVHRRDLRGTAVHTDDGERSAARPPIDATDRIMRQTKISSLKTWWEEADSEQRGAMIRYLYEDPTDSECAEIIAELPEEDQAKLDSLHLPAGRAAYSRESLTALSDHMLATTDDLHEARKRLFGVDDSWAPPAEAINAPVGNPSVDRTLKIVGRYLSAVESMWGTPEVIHVEHVRDGFTSERMADERDKANRRRYNDNQEAMKKIQRDYGKEGYISRGDIVRLDALELQGCACLYCGTTIGYHTCQLDHIVPQAGPGSNNRRGNLVAVCERCNRSKSNTPFAVWAQKCGIPHVGVKEAIGRVRGWRKQTPNTSSEDLTRLKKEVIARLRRTQEDPEIDERSMESVAWMANELHHRIAAAYPETTVMVYRGSITAAARKAAGIDSRINLIGEKGRKDRIDRRHHAVDASVVALMEASVAKTLAERSSLRGEQRLTGKEQTWKQYTGSTVGAREHFEMWRGHMLHLTELFNERLAEDKVYVTQNIRLRLSDGNAHTVNPSKLVSHRLGDGLTVQQIDRACTPALWCALTREKDFDEKNGLPAREDRAIRVHGHEIKSSDYIQVFSKRKKTDSDRDETPFGAIAVRGGFVEIGPSIHHARIYRVEGKKPVYAMLRVFTHDLLSQRHGDLFSAVIPPQSISMRCAEPKLRKAITTGNATYLGWVVVGDELEINVDSFTKYAIGRFLEDFPNTTRWRICGYDTNSKLTLKPIVLAAEGLENPSSAVNEIVELKGWRVAINVLTKVHPTVVRRDALGRPRYSSRSNLPTSWTIE

SEQ ID NO: 273 - protein, 1181 aa, Actinomyces sp.
MLHCIAVIRVPPSEEPGFFETHADSCALCHHGCMTYAANDKAIRYRVGIDVGLRSIGFCAVEVDDEDHPIRILNSVVHVHDAGTGGPGETESLRKRSGVAARARRRGRAEKQRLKKLDVLLEELGWGVSSNELLDSHAPWHIRKRLVSEYIEDETERRQCLSVAMAHIARHRGWRNSFSKVDTLLLEQAPSDRMQGLKERVEDRTGLQFSEEVTQGELVATLLEHDGDVTIRGFVRKGGKATKVHGVLEGKYMQSDLVAELRQICRTQRVSETTFEKLVLSIFHSKEPAPSAARQRERVGLDELQLALDPAAKQPRAERAHPAFQKFKVVATLANMRIREQSAGERSLTSEELNRVARYLLNHTESESPTWDDVARKLEVPRHRLRGSSRASLETGGGLTYPPVDDTTVRVMSAEVDWLADWWDCANDESRGHMIDAISNGCGSEPDDVEDEEVNELISSATAEDMLKLELLAKKLPSGRVAYSLKTLREVTAAILETGDDLSQAITRLYGVDPGWVPTPAPIEAPVGNPSVDRVLKQVARWLKFASKRWGVPQTVNIEHTREGLKSASLLEEERERWERFEARREIRQKEMYKRLGISGPFRRSDQVRYEILDLQDCACLYCGNEINFQTFEVDHIIPRVDASSDSRRTNLAAVCHSCNSAKGGLAFGQWVKRGDCPSGVSLENAIKRVRSWSKDRLGLTEKAMGKRKSEVISRLKTEMPYEEFDGRSMESVAWMAIELKKRIEGYFNSDRPEGCAAVQVNAYSGRLTACARRAAHVDKRVRLIRLKGDDGHHKNRFDRRNHAMDALVIALMTPAIARTIAVREDRREAQQLTRAFESWKNFLGSEERMQDRWESWIGDVEYACDRLNELIDADKIPVTENLRLRNSGKLHADQPESLKKARRGSKRPRPQRYVLGDALPADVINRVTDPGLWTALVRAPGFDSQLGLPADLNRGLKLRGKRISADFPIDYFPTDSPALAVQGGYVGLEFHHARLYRIIGPKEKVKYALLRVCAIDLCGIDCDDLFEVELKPSSISMRTADAKLKEAMGNGSAKQIGWLVLGDEIQIDPTKFPKQSIGKFLKECGPVSSWRVSALDTPSKITLKPRLLSNEPLLKTSRVGGHESDLVVAECVEKIMKKTGWVVEINALCQSGLIRVIRRNALGEVRTSPKSGLPISLNLR

SEQ ID NO: 274 - protein, 1120 aa, Actinomyces sp.
MNAMKQYNAGIDVGINSVGFAAIEVDSKGLPLNILNNMVVLHDSGVDPGTAKTGATRLANSGTARRTRKLIARRRKRLQKLDRYIEVQGWPLVDFSSLPDPYTPWKIRAKLTQDRLEGEEQGRGLSIALRHMARHRGWRNPYEGVESLHSPKEASKQFKDLKDRVTKVSGVIFDEDATPAEVVCDIGLSPKQRLRSAPSAKYKEGATLADEPVGGKSKEGLLGGKLMQSDNANELRKIGIVQGLSNEKVNEIIDQVFASESPKGQAGKRAKKDELPGQEQYVRALRAHLAFQRFRIVAAVANLRILEAEPKHERLLSQSEKDKVIEFLMSADGDDGVTWSDVAEELGIERECLSGTAKRGADGERPSSFPPTNSTNISIVRSKVKPLIEWWRKASDDEQATLVTALSNADELTDDQPSAETVRQFLSSPDEQSQEKIDKISLPKGRAAYSVNSLERLTRRMLKDSVDLFEARKREFGVDNNWTPTPDSIGEPVGNPAVDRVLKIVNRWLLAVTRKWGPPKVVNIEHVRVGFTSAAQTRKYEEENKTNRERNLAILEELRDKFGTSGKIRREDITRFAALRRQNCQCAYCGEAITFFDCEMDHIVPRKGPGSTNTRNNLVAICERCNKSKSNMPFSLWAQNCDIPGVSVEAVIDRVRTWIKDPELNPKQYNNFKKDVIERLRKTVDDDAIDNRSIESVAWMATELADRIGSHFRTAGANTKVRVYRGWLTSEARKASGFEGKINLIGGRGKTRLDRRHHAMDAATIALMRQSVAQTLVERASIRESDRLRRVVSSSWKDYRGADRDKQFSYGSWLNSMNALAELFNRAIDADGIPVTQNLRLRLGNGEAHDATIRSLEKKRVGASWTIGEIDRASTPQLWLALTRQEDFDQNDGLPANASRELRVKNHWFHAEENVTLFPTKSAAIAVRGGYAEIGNTIHHARLYKLPGKKLTYGMIRVFAIDLLCAWHTDLFSSPLLPESISLRTAETKVRRAVEDGAAMYIGWLVDGDEIVLDPETKAFKSNKIGEYLCEFPGTKRWKVDGFPDKEKLRLRPLQLAGEGLPEDVSAGTEEILGPKGNGWRVAINALFKSSQLVVVRRTALGMVRKLSRRHLPLTTRLRG

SEQ ID NO: 275 - protein, 1095 aa, Actinomyces sp.
MPAHHLRVGIDVGTHSVGLATLRVDDQGTPIELLSALSHIHDSGIGKEGQKDHDTRKKLSGVARRTRHLLRNRRERLQQLDKVLVDLGFPIPKPEEYPDLSERTDPYRVWRVRARLVEETLPEELRGPAISMAVRHIARHRGWRNPYSKVESLLSPAEESSFMKALRKRIMTKTGEVLDDDITPGQAMAQVALTHKIYMRGPEGILGKLHQSDNANEIRKICARQGISSDVCKQLLRAVFKAESPRGSAVSRVAPDPLPGQGSFRRAPKCDPEFQRFRIISIVANLRISETKGENRPLTVDERRQVVAFLMEDSQADLTWVDVAEKLRVSRQALRGTAMLTADGERSAAQPPIDVTDQIMRKTKISALKTWWDKADAERRGAMVRYLYEGLEDSECAEVIAKLPEKDHAKLDSLHLPAGRAAYSRESLTALSDHMLETTNDLHEARKRLFGVDDSWAPPAEPVGAPVGNPSVDRTLKIVARYLSAVESIWGTPEVIHVEHVRDGFTSERTAEERDKANRSRHNDNQKAIEKIQHDYGKEGYISRGDIVRFHALKLQGSACLYCGTTIGYHTCQLDHIVPQAGPGSNNRRGNLVAVCERCNHSKSNTPFAVWAQKCGIPHVGVKEAISRVNGWVEHNHSTSSGDLTRLKKEVIARLRRTQKDPEIDERSMESVAWMANELHHRIAAAYPETTVMVYRGSITAAARKAASIESRINLIGEKGRKDRLDRRHHAVDASVVALMEPSVAKTLAERSSLRGEQRLTGQEQTWKQYTGLTVGARERFEAWRGHMHRLTELFNESLAADEVYVTQNIRLRLSDGSAHTVKASKLVSHRLGDGLTVQQIDRACTPALWCALTREIDFDEKNGLPAREDRVIRVHGQEISSADCIQVFSKRKKTKSDRDEAPFGAIAVRGGFVEIGSSIHHARIYRIEGEKPAYAMLRVFTHDLLSQRHGDLFSAVIPPQSISMRCAATELRQAISEGRATYLGWIVSGDELHIPVETFTTHKIGSFLKDYPNTTRWRICGYDSETMLILKPRILSAEGLNNSSDIAEYVIKNKGWRVAINKLAKVHPTVVRRDALGRPRHSSRSNLPVTWSIE

SEQ ID NO: 276 - protein, 1144 aa, Actinomyces sp.
MSMIDSSENVPGIRYRVGIDVGLKSIGFCAVEVDRNDQPVRMLNSMVFIHDAGVDPNENKAAKSRKLTAGVARRTRRLYRTRHQRLVNLDRVLSKEFGWPLPDLTSFKDPREPWHVRAGLLEGYIADDEKRKEALSIALRHIARHRGWRNPYAKVETLLQPSEPSDFLKGLNDRISEELGRAFPADATPGQLVDTYLAHPDYVGRAGTPKLRGPQGILAGKLHQSDNAQEIRGICDVQRIEPAERDRLIRVVFEAKSPKGSAKERGLVGYDELPGQGRHVRAEKAHPAFQLFRMVSVLANLRIREGREERPLTPDELEDLVDFINQVSLKQEVTWQDLADKLRIERADLRGTAKASFDGSPVLRNPPTDVTTEKIMACKVKWLKEWWKEADDEQRGYMVDAFSNSGGSEDGTDVNDEVAELLEQATEDDQLEFEKISLPQGRAAYSLDSLRRLTDRMLRDGVDLHTARRLEFNVGDDWKPAVEPIGAPTGNPAVDRVLKQVSRWLHAATERWGEPTVINIEHARDGLGSERVARELMRENEKRRKANASAVAEMAAKLKLSGKVHRSDQIRYFALQRQNCQCLYCGAPITYTTAEMDHIVPRADGSSTNDRSNLAAVCRTCNHMKGKIPFAVWASSDKANQGVSLTGALERVNMWQRDSGMSPRQLKQLQREVCARLKSKKPDQEFDGRSMESVAWMAVELRTRIEGFYRSRDEESVPSVGVYRGQLTAEARRASGFESRVNLIGGRGKTRFDRRHHAMDALVIALMNPSVSRTLALRLNMRDAQRLTGVEETWKHFYGKPGEASKRFESWRESMLRGVELFNIALSDNAIPFVENIRLRVGSSVIHDATVHSFCPPKTPDGKQIITKGYGEQHSLGSAMPVELIDRAETPALWTALTRCPDFDPKKGLPENPQRTISVNGTRVGPTELVNFFEFSKSGPKACLKVRGGYVDLSGAIHHARIYRIAGKKTAYAMIRVFQVDLLRLKDHDVFTTPLKPSTISMRTAEPKIREALANGTATQIGWLVEGDELVIDTSKYSGGFIGEVLARYPEATSWRVAGFMTPAKLRIKPILLSKEGFVDETQAALLGVEVTSEAIQKTVDRPGWLPAVNVLFGAGGVRVIRRNCLGEERYHSSASLPVSMTLE

SEQ ID NO: 277 - protein, 1103 aa, Actinomyces sp.
MTKINDDLRYRVGIDVGLKSIGFCAVEVDENDQPLRLLNSMVFVHDAGVDPNENKAAKSRKLTAGVARRTQRGTAQNRRRLAELDRALSEELNWPLPNLEDFEDSYEPWHTRAELVEHYIKDDAERAEALAIAIRHIARHRGWRNPYLSVDSLLTPQEPSKFLRGLNERVTQALGREFPADATPGQLICAYIDSPKYAETQGIRGDSGILSGKLHQFDNVGEIRKICEVQRLDHDVFKLLVRKVFFAKSPRGSAAGLVGHDQIPGQGKYIRAEKAHPDFQLFRIVAVLTNLRIREGKAERCLTPDELRGLVDYILEVQLKQQVTWADLADNLGIERTDLRGTARASFDGSPALRFPPTDVTAEKIMASKVKWLKDWWDKADSERRGFMVDALSNSGGSTGDNDIDDEVAALLEAATEDEQAELEKIQLPQGRAAYSLDSLRRLTKRMLEEGVDLHTARKEEFNVDDDWRPEPEPIEAPVGNPAVDRVLKQVARWLNMATDRWGVPDVINIEHTRDGLGSEKVARELLRESQKRQDLNQKDMDKMIRELGISGKARRSSLIKYQAIQRQNSMCLYCGTEIGFETAEMDHIVPRALSGSTNDRSNLAAVCRACNHQKGAVPFAVWATSGEAHAGVSLEDAIKRVRLWQKGPGMSPKQHKAFQNEVISRLKSRKPDEEFDGRSMESVAWMAVELRTRIDGYYRKVNSDSVPKVGIYRGQLTAEARKASGFENRVNLIGGKGKTRFDRRHHAMDALVIAMMNQSVSQTLALRVNMRESQRITGQEETWKNFYGKPGQASERFEKWREGMLRAVELFNIELAKNAIPFHENVRLRVGSSKVHDDTVRKFIHAKLGEALSVAMIDCAETPALWTALTRLPDFDPKDGLPEDLSREIYIHSRKITADEQLNFFNSPSACLKVRGGYVEIGSSIHHARVYRIDGKKTTYSMVRVFATDLVKMTHEDVFTTPLKPSTISMRTADPKIRKALADGTATQIGWLVEGDELQLETDKYSGGLIGEVLAEYPQLTSWRVAGFYGVTQLRLRPYMLAAEGIPSDASESLRKVIEGKGWLPAINALLSSGCVKVVRRNCLGEPRFNAKSSLPVSQLLR

SEQ ID NO: 278 - protein, 1114 aa, Actinomyces turicensis
MQFHFYMVYVTMKGMNDKDASQQLRYRVGIDVGTHSIGFCAVEVDESGMPIQLLNSMVHKHDSGIDPGGNDTATTRLAEAGVARRTRRLIRRRKKRLQELDAFIEECGWPLVDLATITDARSPWRIRAHLATEHIDDEAEQGKLLSIALRHMARHRGWRSPYARISSLHIQADPSEQLKALAQRVSEKTGISLTADQTPAQLISVYLDVFETGKLRGPEGILGGKLMQSDNANELRRIATVQGLDNDLLKKIIGFVFAAESPKGSAAKRVGKDVLPGAHGLRAEKAHPAFQQFRIVSIVQNLRIKEGTGLRALTSEETEIVVDFLNQAGLTEAPTWEEVADNLEIPRSHLKGTATEGFDGIAPSTRPPFDVTSQKILNGKLKKLSAWWKDADYDHRCAMVNALSNVGSDDEGSLADDDVREFLSDFTDEELEALDKVELPGGRAAYSVDSLEKLTNTMLSEGCDLHSARKIAFGVDDSWTPPAEPIGQPVGNPAVDRVLKQVARWISAATNQWGTPESVNIEHVRDALGSEKASREYQRSLQTRRIRNEKLFAEMRERLDIGGKPRRSELTRYLALQRQNCQCLYCGMPITYTDAEMDHIVPRKGAASTNTRENFAAVCRACNHQKSNLPFAVWAEKTERPGVSVKEAYKRVSDMRIEPGMNGRQMNEFRKAIRLRLTTKHADAEIDGRSLESVAWMANELRHRIEGFYRSAENDVTVRVFRGAVTAEGRRASGFESRVNLIGGKGKTRLDRRHHAMDALTIALMEPGIAQTIALRMNMRESQRVLGEQETWKSFTGGSDTARKRWEHWCEEMLRASELFNVFLAEDRIPICQNKRLRLGSSAVHKAIVQPFEASDKRIVSDAMPVELIDRASTPALWTALTRDPDFDPKEGLPANPSRTIRLHDKRLGPNETVEFFPTAAACLAIRGGYCEIGAGIHHARIFRISGKKTTYAMLRVYQCDLVRFQKENLLTVELPANTISVRTAVPKLREALAHGTAEQIGWLVVGDELKIDLSGFTTGQIETFNETYPQATRWEVTGFPTKTQLRLKPLLIASEGLADDVPDDIVKIVKGPGWWPAIDKLLKIGNVVLYRRDTHGKPRVVSHRSLPLSSKLQ

SEQ ID NO: 279 - protein, 1113 aa, Alcanivorax sp.
MRYRVGLDLGTASVGAAVFSMDEQGNPMELIWHYERLFSEPLVPDMGQLKPKKAARRLARQQRRQIDRRASRLRRIAIVSRRLGIAPGRNDSGVHGNDVPTLRAMAVNERIELGQLRAVLLRMGKKRGYGGTFKAVRKVGEAGEVASGASRLEEEMVALASVQNKDSVTVGEYLAARVEHGLPSKLKVAANNEYYAPEYALFRQYLGLPAIKGRPDCLPNMYALRHQIEHEFERIWATQSQFHDVMKDHGVKEEIRNAIFFQRPLKSPADKVGRCSLQTNLPRAPRAQIAAQNFRIEKQMADLRWGMGRRAEMLNDHQKAVIRELLNQQKELSFRKIYKELERAGCPGPEGKGLNMDRAALGGRDDLSGNTTLAAWRKLGLEDRWQELDEVTQIQVINFLADLGSPEQLDTDDWSCRFMGKNGRPRNFSDEFVAFMNELRMTDGFDRLSKMGFEGGRSSYSIKALKALTEWMIAPHWRETPETHRVDEEAAIRECYPESLATPAQGGRQSKLEPPPLTGNEVVDVALRQVRHTINMMIDDLGSVPAQIVVEMAREMKGGVTRRNDIEKQNKRFASERKKAAQSIEENGKTPTPARILRYQLWIEQGHQCPYCESNISLEQALSGAYTNFEHILPRTLTQIGRKRSELVLAHRECNDEKGNRTPYQAFGHDDRRWRIVEQRANALPKKSSRKTRLLLLKDFEGEALTDESIDEFADRQLHESSWLAKVTTQWLSSLGSDVYVSRGSLTAELRRRWGLDTVIPQVRFESGMPVVDEEGAEITPEEFEKFRLQWEGHRVTREMRTDRRPDKRIDHRHHLVDAIVTALTSRSLYQQYAKAWKVADEKQRHGRVDVKVELPMPILTIRDIALEAVRSVRISHKPDRYPDGRFFEATAYGIAQRLDERSGEKVDWLVSRKSLTDLAPEKKSIDVDKVRANISRIVGEAIRLHISNIFEKRVSKGMTPQQALREPIEFQGNILRKVRCFYSKADDCVRIEHSSRRGHHYKMLLNDGFAYMEVPCKEGILYGVPNLVRPSEAVGIKRAPESGDFIRFYKGDTVKNIKTGRVYTIKQILGDGGGKLILTPVTETKPADLLSAKWGRLKVGGRNIHLLRLCAE

SEQ ID NO: 280 - protein, 1146 aa, Alicyclobacillus hesperidum
MAYRLGLDIGITSVGWAVVALEKDESGLKPVRIQDLGVRIFDKAEDSKTGASLALPRREARSARRRTRRRRHRLWRVKRLLEQHGILSMEQIEALYAQRTSSPDVYALRVAGLDRCLIAEEIARVLIHIAHRRGFQSNRKSEIKDSDAGKLLKAVQENENLMQSKGYRTVAEMLVSEATKTDAEGKLVHGKKHGYVSNVRNKAGEYRHTVSRQAIVDEVRKIFAAQRALGNDVMSEELEDSYLKILCSQRNFDDGPGGDSPYGHGSVSPDGVRQSIYERMVGSCTFETGEKRAPRSSYSFERFQLLTKVVNLRIYRQQEDGGRYPCELTQTERARVIDCAYEQTKITYGKLRKLLDMKDTESFAGLTYGLNRSRNKTEDTVFVEMKFYHEVRKALQRAGVFIQDLSIETLDQIGWILSVWKSDDNRRKKLSTLGLSDNVIEELLPLNGSKFGHLSLKAIRKILPFLEDGYSYDVACELAGYQFQGKTEYVKQRLLPPLGEGEVTNPVVRRALSQAIKVVNAVIRKHGSPESIHIELARELSKNLDERRKIEKAQKENQKNNEQIKDEIREILGSAHVTGRDIVKYKLFKQQQEFCMYSGEKLDVTRLFEPGYAEVDHIIPYGISFDDSYDNKVLVKTEQNRQKGNRTPLEYLRDKPEQKAKFIALVESIPLSQKKKNHLLMDKRAIDLEQEGFRERNLSDTRYITRALMNHIQAWLLFDETASTRSKRVVCVNGAVTAYMRARWGLTKDRDAGDKHHAADAVVVACIGDSLIQRVTKYDKFKRNALADRNRYVQQVSKSEGITQYVDKETGEVFTWESFDERKFLPNEPLEPWPFFRDELLARLSDDPSKNIRAIGLLTYSETEQIDPIFVSRMPTRKVTGAAHKETIRSPRIVKVDDNKGTEIQVVVSKVALTELKLTKDGEIKDYFRPEDDPRLYNTLRERLVQFGGDAKAAFKEPVYKISKDGSVRTPVRKVKIQEKLTLGVPVHGGRGIAENGGMVRIDVFAKGGKYYFVPIYVADVLKRELPNRLATAHKPYSEWRVVDDSYQFKFSLYPNDAVMIKPSREVDITYKDRKEPVGCRIMYFVSANIASASISLRTHDNSGELEGLGIQGLEVFEKYVVGPLGDTHPVYKERRMPFRVERKMN

SEQ ID NO: 281 - protein, 1552 aa, Anaerophaga sp.
MFSQRNNPYCELLQNVKQLYKEKFGKTNQVDNSIIYGFMKRILGLDLGTNSIGWALVENDENDRKGKIIGMGSRIIPMDMSELDNFNKGASISKTAERTRLRMTRRLRERHLLRRARLHRILNIMGFLPEHYRNSIDFIDKKGCFFEGQEPKIAYKPDKNSEQFCFLFTSSFHEMLEDFRKFQPELIQNRKKVPYDWTIYYLRKKALTQKISKEELAWIILNFNTKRGYYHLRGEDEDNQDNKKIKEFRALKVVNVTEREGANSSGKKWYDMELENGWVYSRQSNLPPNLEGKTIELIVSYTLDNNGNIKKDKNGKEKYSLSMPGEEDWNLVKIKTENDLKTSKKSVGEYIYDHLLKNPDQKIRGKLISTIERKFYKEELSRILKTQMNFYEELKNRELYQKCVEELYPNNKSHQQTLLQKDFIHLIVEDIIFYQRPLKSKRAFVNNCPLEYRVYVDKKSGELIKSGVKCIPKSHPLFQEFRLWQYVRNLRIYERERMVNGRLMVNVDVTNELLPDEEHIVRLFDLLNDRKSFKQDDVLRFVGIKSPKDRKRYSWNYPEDKELPGNETRHLILAWLKKVDGVPEDWLDPEKLKALWHLLYSVTDREEIIKGLHSFAKKYELPDTFVEHFKKIPRLEREYGSFSEKAIKKLLPLMRMGKYWKAEEIPADLLEKAQKIIDAEADDRISDEVREKLLHLKDISQLKGLPLWQASYLVYGRHSETGEVVKWRTSEDLEKYILQFKQHSLRNPVVEQVILEALRVVKDIWEHYGEGKEGFFNEIHVEIGRELKNPADKRKKITSQIQENENTNLRIKALLEELFNDPSVKNVRPYSPAQQEILRIYEDGVLNGQKEIPDDILKISKMARPSKSQLVKYKLWLEQKYRSPYTGEIIPLSQLFTSAYEIEHIIPQARYFDDSFSNKVICEAEVNREKGHQLAFEFITKRGGDEIELNFGKKVTILNVEEYQKFVKDHYGRSLRSLSKMRKLLMEDIPDDFIDRQLNDSRYISKVVRNLLSNIVRAEDENSLVSKHLITCTGGVTTRLKHEWGLNDVWNELITPRFVRLNKMGKEKFGEWINKKGKQVFQIQMPLELQKGFNKKRIDHRHHALDALVVACASRSHVNYLNNDSARANASETRYDLRNKLCYKDKTDSNGNYRWKFYKPWESFTEEAKNRLAGTVVSFKSNRRIMTRSSNRYFKWVDTSEGKKKKLVRQIKGDNQAIRKPLHKDTVLGKVSLRKEKKVSLSKAIDLWESIVDKPLKKRIQSLREQGYDKKLLLKYFKDRNNQFNGQDISRVNIYFFDNNLAARRVTLDASFNSEKRIDGITDSGIKKILYAHLQNEKYHGKKDEKGNEISPYELAFSPEGLEEMNANIKKLNGGKPHCPIYKVRLAETIGEKFKLGEKGNKNKKYVEAAKGTNLFFAVYVDEKGVRSFETIPFSVALERRKQKLAVVPEENENKEKLLFYLSPNDLVYVPDEDEKLIDYRQLSINPTRIYKMVSSSGTQCFFIPHFVASPIVQTMELGPNNKSERAWDGQMIKNVCYKLSVDRLGNVKIEK

SEQ ID NO: 282 - protein, 1515 aa, Anaerophaga thermohalophila
MKRILGLDLGTNSIGWALVESDEEQKSGKIQGIGSRIIPMDQNELDNFNKGNTVSQTAERTRLRMVRRLRERHLLRRERLHRVLKEIGFLPEHYLEQIDFTEKPGGFLPGKEPKIAYKPDNFKDKYDFLFQDSYHEMLSDFQDKNPEFIQKRKKVPQDWTIYYLRKKALTAKITKEELAWIILNFNQKRGYYQLRGEDEDVAKNTKKEEFHALKVVKVKEREDSEGASGKWYDIELENGWVYPRQSNIRPDWEGKILELIVTYNLDKDGNIKTDKEGNEKRSFRMPNKDDWTLRKKRTENEIEKSGKTVGEYIYDNLLDAPDLKIRGKLVSTIERKYYRSELEQILTAQKKYHPELSNSELFNKCISNLYPNNDIHRKALLSKDFVHLIINDIIFYQRPLKSKRSTVSNCPLEYRVYVDKVTGEKKKVPLKCIPKSHPLYQEFRLWQYVKNLRLFEKERFENGRLLTNVDVTEQFLPDEDKYVELFEFLNGRKTFKQDDILKFAGIKSAKDRVKYYWNYPQEKEYPGNETRYLIESRLKKIENVPDEWLNYEKIEELWHLLYSVTDKVEIEKGLQSFAAKYQLPDLFVEVFKGFPRMEREYGAFSKKAIKKLLPLMRMGKYWKLENINPDLIEKVQKIIDGEADDNINDGIRERFSEINEMSDLRGMPLWKASYLVYGRHSEAAEVIRWRTSADLDQYIKDFKQHALRNPIVEQVVLEALRVVKDVWNYFGEGREKFFDEIHVEIGRDLKNPADKRQKIANQIQENENTNLRIKALLVELFNDPEVQNVRPYSPVQQQLLKIYEDGVLNAERDIPDDIQKISRMANPTRNQLIRYKLWLEQKYRSPYTGEIIPLNKLFTSEYEVEHIIPRARYFDDSFSNKIISEAEVNRKKDRMLAFEFIKKLGGSTIDLNYGKKVSVLTVEEYQQFVKDHYGINPHSRLKMQKLLMDEIPESFIERQLNDSRYISKMVRNLLSNIVREENENSPVAKQLITCSGSITNTLKQEWGLNDVWNTIITPRFERLNKMGEQKYGEWVNKEGKPVFQIQMPLELQKGFNKKRIDHRHHALDALIVASATRSHVNYLSNEAAKTNAKDTRFDLRNRLCYKEKRGQNRNFTWRFYKPWNTFTEDAKNALNDIVVSFKSNHRVINKSTNRYFKWENLPGGMKKKRLVRQEKGDNWAIRQSLHKDTVLGKVSLRKVKPVSLSVALDSWNNIVDKALKKKIRSLKDQGYDKKLMLKYFKDRRNEYNGENISRVNVYYFDEEMAARRVDLDTSFNSEKRIEGITDSGIKKIIYAHLKNEKYHGQKDDKGKDISPYELAFSPEGIAEMNANIKQLNGGKPHCPIYKVRLAEPVGEKFQLGETGNKTEKLVEVAKGTNLFFGVYANDEGVRSFATVPFYLAVEREKQGLPAVPQENENGDQLLFWLSPNDLVYVPSEEDAHFANPKQIELDNSRIYKMVSSTGTQCFFIPHFVATPIVQTIELGPNNKSERAWDGQMIKKVCYKLSVDRLGNVEIE

SEQ ID NO: 283 - protein, 333 aa, Bacillus cereus
MMNPNNFTKEDFWRTIILYGLNQATYKIALGQSLIRFSEQQRNVVSMNELAEDFFDMYLERLKNGKPQLATPNRQTAMERIINSYNIGRLTRSQAIEKVEREAFNDVIDRFHTVDSLQVPMKFYEKTDKGIVIFDNVFEIFSDNNNFELRNELDARWDLLESAFEIKRTDSQLVNDIRKLYLANGYERTDITKNRSVLNGYQSNVCFYCGELMSDDDVHVDHVIPRQLINHDDIWNLVLSHGFCNQQKSDNLPDVNYIEKLIERNEYFIKSNHPISNKLKERLGNTPRRRRTTIDRIYEHAKLVLAPWKGIYGYNPATDPFYKTFIRNIVLSK

SEQ ID NO: 284 - protein, 1068 aa, Bacillus cereus
MRYVLGLDIGIASCGWAVINQEKERIEDLGVRIFDKAENPKDGKSLAAPRRDARSTRRTLRRKKHRMQRIKILLVKQGLLFKTELNHLYESATEFDVWNLRLDALERKLHPKEFARVLIHLAKRRGFKSNRKETTLSENGQILESISENQQIMEQQNYRTVGEMILKDKKFENHKRNKDGTYIGTVTRQQLQDEIQMIFHTQRLYKNDYATEEFESSYLEIWASQRPYASKDQIEKMIGYCTLEPKEKRTPKASWSFQYFVALQTINNLRLISKDKIEELSFEEKKQIMNLALEKPIVKYIDIRKLLSIPNDFQFNSLSYSADTVDTTLENKRCIELKEYHSINKVYKQVYGKNTPNLLPIDYDTIAYGLTIFKDDKDILEYLQNKYVNAKGKPIKNLAKKTYDDTFIQALLNLNFTKMGHLSFKALKNIIPFLEEGLSYDKACEKAGYNFKGTSYTERTKYLPVIPQNTNPVVHRALSQTRKVINAIIKKYGSPNAIHIETARELSKTFQERKEIDSRYQDNSKKNEHAIHKLKELGNINPSGINIVKFKLWSEQDGRCMYSGKYIEPHRLFEEGYTEVDHILPYSRSLDDSYNNKILTLGTENQRKGNKTPYEYMGNTSIWDEFETRVQSNKKINFKKQQKLLLQNFSYAREQEFIERNLNDTRYATIYLTSLIQQHLIFSESSSKKKVRTVSGIITSHLRSRWGFNKDRKEGHIHHALDAVIVAVTSNHMIQRVTKYYKLKELNKNLQAKQLPFPEPWEGFRLELEARISPNTQQYLKGIHFKNYADVNLSDIKPIFVSRMPKRSITGELHQETIRKFLGYNEKGKVLTAIKTKLEDIPFDANGDFPMYGKETDLYTYNAIKERYLSHEKDKRKSFQEPLYKPTKSGEIGPLIKSIKIMDTRTIVNPVNQGKGVVYNSKIARTDVFKKEDKYYLIPIYTIDLLKNILPHKAITAGKGYEDWTTIDSSFTFLFSLFPNDLIQIVPSKNKTIKARTTVSKKEILLPSLTGYFKGVHSGTAGITVETHDGSVIANVGSKQLLLFEKYQVDVLGHYTKIKEEKRMGMAI

SEQ ID NO: 285 - protein, 1078 aa, Bacillus cereus
MRYVLGLDIGIASCGWAVINQEKERIEDLGVRIFDKAENPKDGKSLAAPRRDARSTRRTLRRKKHRMQRIKVLLVKHGLLSKTELDHLYESATEVDVWNLRLDALERKLYPKEFARILIHLAKRRGFKSNRKETTLSENGQILESISENQQIMEKQNYRTVGEMILKDKKFENHKRNKNGTYVGTVTRQQLQDEIQMIFHAQRLYKNDYATEEFESSYLEIWASQRPYASKDQIEKMIGYCTLEPKEKRAPKASWSFQYFVALQTINNLRLISKDRIEELSFEEKKQIMNLALEKSIVKYIDIRKLLSVPNEFQFNSLSYSADTVDTAVESRKCIELKEYHSINKVYKQIYGENALNLLPKYYDTIAYGLTIFKDDKDILEYLQNKYVNAKGKPISNFANKTYDDTFIQALLNLNFTKMGHLSFKALKNIIPFLEEGLSYDKACEKAGYNFKGTSYTEQTKYLPVIPQNTNPVVHRALSQTRKVINAIIKKYGSPNAIHIETARELSKTFQERKEIDSMYQDNSKKNEHAIHKLKELGNINPSGINIVKFKLWNEQDGRCMYSGKYIEPHRLFEEGYTEVDHILPYSRSLDDSYNNKTLTLGTENQRKGNKIPYEYMGNTSIWNDFETRVQSNKKINKKKQQKLLLQHFSYAREQEFIERNLNDTRYATIYLSSLIQQHLIFSESSRKKKVHTVSGIITSHLRSRWGFNKDRKEGHIHHALDAVIVAVTSDHMIQRVTKYYKLKELNRNLQAKRMPFPEPWEGFRLELEARISPNTQQYLKGLRFKNYADVNLSEIKSIFVSRMPKHSITGELHQETIRKFIGYNEKGKVLTAIKTKLEDIPFDANGDFPMYGKESDLYTYNAIKERYLSHKKDKRKSFQEPLYKPTKSGGIGPLIKSIKIMDTRTIVNPVNQGKGVVYNSKIARTDVFKKEEKYYLIPIYTIDLMKNILPQKAITAGKGYEDWTTIDPSFTFLFSLFPNDLIQIVPSKNKTIKARTTVSKKEVLLPSLTGYFKGVHSGTAGITVETHDGSVIANVGSKQLLLIEKYQVDVLGNYTKIKEEKRIGLTTYNDNKKIAAC

SEQ ID NO: 286 - protein, 1088 aa, Bacillus smithii
MNYKMGLDIGIASVGWAVINLDLKRIEDLGVRIFDKAEHPQNGESLALPRRIARSARRRLRRRKHRLERIRRLLVSENVLTKEEMNLLFKQKKQIDVWQLRVDALERKLNNDELARVLLHLAKRRGFKSNRKSERNSKESSEFLKNIEENQSILAQYRSVGEMIVKDSKFAYHKRNKLDSYSNMIARDDLEREIKLIFEKQREFNNPVCTERLEEKYLNIWSSQRPFASKEDIEKKVGFCTFEPKEKRAPKATYTFQSFIVWEHINKLRLVSPDETRALTEIERNLLYKQAFSKNKMTYYDIRKLLNLSDDIHFKGLLYDPKSSLKQIENIRFLELDSYHKIRKCIENVYGKDGIRMFNETDIDTFGYALTIFKDDEDIVAYLQNEYITKNGKRVSNLANKVYDKSLIDELLNLSFSKFAHLSMKAIRNILPYMEQGEIYSKACELAGYNFTGPKKKEKALLLPVIPNIANPVVMRALTQSRKVVNAIIKKYGSPVSIHIELARDLSHSFDERKKIQKDQTENRKKNETAIKQLIEYELTKNPTGLDIVKFKLWSEQQGRCMYSLKPIELERLLEPGYVEVDHILPYSRSLDDSYANKVLVLTKENREKGNHTPVEYLGLGSERWKKFEKFVLANKQFSKKKKQNLLRLRYEETEEKEFKERNLNDTRYISKFFANFIKEHLKFADGDGGQKVYTINGKITAHLRSRWDFNKNREESDLHHAVDAVIVACATQGMIKKITEFYKAREQNKESAKKKEPIFPQPWPHFADELKARLSKFPQESIEAFALGNYDRKKLESLRPVFVSRMPKRSVTGAAHQETLRRCVGIDEQSGKIQTAVKTKLSDIKLDKDGHFPMYQKESDPRTYEAIRQRLLEHNNDPKKAFQEPLYKPKKNGEPGPVIRTVKIIDTKNKVVHLDGSKTVAYNSNIVRTDVFEKDGKYYCVPVYTMDIMKGTLPNKAIEANKPYSEWKEMTEEYTFQFSLFPNDLVRIVLPREKTIKTSTNEEIIIKDIFAYYKTIDSATGGLELISHDRNFSLRGVGSKTLKRFEKYQVDVLGNIHKVKGEKRVGLAAPTNQKKGKTVDSLQSVSD

SEQ ID NO: 287 - protein, 1069 aa, Bacillus thuringiensis
MNYDIGLRIGITSCGWSIINKDLERIEDLGVRVFEKAENPDGTASAAPRREARKSRRKHRRKKHRIERIKRLIVQHDLLSKKELDSLYLSPFNIDVWNLRVEALERKLDNREFARVLIHLVQRRGFQTIRKSVEIQEEGKLLENVSENERIMKVNGYKTVGEMFSKHEKFTHHKRNKDGSYTSVVTRSLLLKEIKTIFNSQRILGNVFSTQKLESDYLYIWGSQRPTLTYEQLMSMVGNCIYEKKEKRAPKTSWAFQYFSLLQKINKLKVSDDNTLRKLSKEERDIVIELAFKKKNVSFVDIRKALKLNDNTKFNHLTYSHVVETKKVEKATFIELKGYHLIKKQLKDRNVELTQELQPKDYDAIAAASTFFKNDIEFRDYLRNQYLDSNGKRKSNIANKVFEDKVIAAVFELNFSKVCHLSFKSLYKLIPHLEKGLDYKEAILCAGYNFRDENKRDKKLFLPVIQQETNPVVHRALTQARKVINAIIREYGSPNTIRFVVANDLAKTYKQRKELESTLKKNRAENEKIKTKLLSMGIINPTGMDIVKYKLWYEQSGICLYTGRQMELSSLFKPGYSIVNHIIPYNRSFDDTYHNRVLTLTETKYEKGNKIPFEYFGAEETCWNEYEKRVSTSKKIHDKKREKLLIRNFDIEYENEMISNNVFDTHYIGSYFEKYIDEHLQFKKSTKKQKVFSIHGNMVAHLHSRWGFNKNSREIYLNHAVDAAIVAVLTDQLIRNIADYYRRDNILEQKGSLKFPEPWKSFSIELEARISPQVRDLIKKLNLDSYLDVDILHIKPVFISKKPRRKVNGEAHKSTIRSLIGINEIGKTVTCIKTRLEDIPFDENGDFPMYGKDTDKYTYTAIKERYLEFNKDKEKAFSTPLYKLKRNGEPGNQIKSVKIIDTRNIVNKVNQGKGIAYNSNIIRVDVFSRDQKYYVVPIYLRDFIKGSLPNKIITAAKGFMQWPETDNSYTFLFSIFPNDLIKVVPKEGKFIKAKNENKENINLTEILGYFKGLDSSTGAFTLESHDGSLLARGIGTKNLLLIEKYQVDVLGRYNKVGNEERQDIKIQQN

SEQ ID NO: 288 - protein, 206 aa, Bacteroides cellulosilyticus
MKKILGLDLGCNSIGWALVNEAENTEEISSIIKLGVRVNPLTVDEMQNFEKGKSITTNADRTLKRSMRRNLQRYKLRRDTLIEVLKEHGFITDSTLLSEHGNKTTFETYRLRAKAAVEEISLEKFARVLLMINKKRGYKSSRKAKGSEDGVLIDGMDVARKLYEEGLTPGELCLQILEAGKKNLPDFYRSDLQNEFDRIWNFQKLV

SEQ ID NO: 289 - protein, 349 aa, Bacteroides coprosuis
MKKILGLDIGTNSVGWAVVNTNQEGEPSQIEKLGSRIIPMSQDILDKFGQGQTVSSTASRTDYRGIRRLRERSLLRRERLHRVLHILDFLPKHYADSIGWDPRNSKTYGKFLPGTEVKLAWVPTADGHQFLFYSTYLEMLEDLKQTQAQLFETSQTPVPLDWTIYYLRKKALTQPITKHELAWLLLHFNTKRGYYQRRGELEDTPTDKLVEYHALKVVDVEVDPEDQSKKPWYFVHLENGWIYKRQSSEPLDNWKGLVKEFIVTTHLDKEGKPKLDKEGEVRRSFSSPKEDDWTLVKKKTENDLEKSGLTVGAYIYQTLLNKPNQKIRGGLIKHIERNYYVEELEQILR

SEQ ID NO: 290 - protein, 1504 aa, Bacteroides coprosuis
MKKVLGLDIGTNSVGWAVVNQNDKGEFLSIEKIGSRIIPMSQDVMDKFGAGQTESSTAQRTQYRGVRRLRERSLLRRERLHRVLHILHFLPQHYDAAIGWNKKENKTYGKFLPGVEVNIPWVATDQGHQFIFMDSYAEMLKDLKQHQPHLFEKSSTPVPLDWTIYYLRKKALTQAISKEELAWILLNFNQKRGYYQLRGEEVEDNTKREEFYALKVVKVELDKDNTSAKTWYKVHLENGFIYPCPSDTPIDSWVGMVKDFIVTTTLEKDGSEKRTADGEIKRSFRAPKEDDWTLLKKKTESELEKSGKQVGAFIYDTLLSNPDQKIIGGLIKTIERKYYKKELEQILETQQKFIAELSDKKLFQACAEELYPLNDSHRENLLERDFKHLFVQDIIFYHRPLKTKKSLISNCTYEYRTFYKNGEKQISPIKCIAKSNPLFQEFRVWQFVQNLRILQRQRSEGDSIKYNVDVTAEFLKDENDIANLFTWLNERKVIKQDQLLKSYFKLKVNKETKELDYRWNYVDDKNKEYPCNATRTHILSFLEKCKEEKRIEDDRFVYSLWHLLYSVVEPIELRGALAKFAEREHLHPSFVDVFAQFPPLEKEYGSYSEKAIKRLLPLMRMGDYWHEDKIDVKTKQRIQRIIDGEADDDITHRSREKVENLRSITDFKGLPLWKAGYVVYNRHSESGELTKWKTPHELSNYIQNEFKQYSLRNPIVEQIVLETLRVVHDLWVKHGDFSEIHLELGRDIKNSSDKRKRMAERQQENENSRQRVLEMLIDLKKEAAFADLNPYSPSQQEKLRIVEDGVLRSNIEIPKDIEKITKSAKPTSRELTKYRLWLDQKYRSPYTGQPISLAQLFTSKYEIEHVIPQAKYFDDSFTNKVICESEVNKEKGSMLAHEFILKNGGSTVNVGGRQVQVLKNDAYVELINRLYGKNNPVKAKKLLAEDIDEVVGDFSERQLNDTRYISRVVQKLLSNIVREEDEQESTSKHVIGCSGQVTTALKKDWGLNDIWNKIIQPRFERLNEMTATEDYGVWQSPNHFQIRVPEEIQKGFTKKRIDHRHHAMDALVIACATRSHINYISNRSGQDRNAKFETTRTDLRSKLCYKENSSGNNYNYIFNKPWDTFTQDAHRALENIVVSHKQNLRVLTKTNNYTQFINKDGKKDLQKQVKGDHFAVRKPMHQETIYGRVSIRSIKEVALKKALENWKQIVDRTLKDKIRELIGAYGKYDAQTILKYFKDRDYKFNNLKINRVEVYEYDHNCAAVRKSIGDDLTIKQIERITDESIRKILMNHLSNYDDNLKEAFSPEGLMEMNKNIKELNGGKNHQPIYKVRLFEDLGSKFPLGVSHNNPDKYAIAAKGTNLFFGIYEDQEGKRMFDSIPLNIVIDRLKEKKSPVPETYNESKLKFHLSPNDLVYVPTDEEQKQPELVDVDHLSDEQKGRVYKAVSFTGNRAFFVNHRVSKVIHDYVEFGTKNKIENDDDKRSLKHICWKLKVNRLGEITDVKR

SEQ ID NO: 291 - protein, 1509 aa, Bacteroides eggerthii
MKTILGLDLGTNSVGWAVINSVIKEQAERIWIEMAGSRIIPMDAAVLGDFDKGNSISQTSERTRLRGARRLRERQLLRRERLHKVLNILGFLPNHYLEYIDFEKHPGKFLADAEPKLAWVKDEQGKYTFLFQAAFDEMLADFAIHQPSLVSGDKKIPYDWTIYYLRKKALTEMISKEELAWILLNFNQKRGYYQLRGEEEEDNAGKSVEFYALKVLTVEATDEKKGRDVWYNVHLENGWIYRRSSSVPLDWEGQVKEFIVTTDLNPDGTPKLDKYGEVKRSFRAPKEDDWMLIKKRTEADIANTHKTVGAYIYDTLLQKPQQKIIGKLVKTVERKLYRDELSLILQKQCAFHAELQDRALYARCVEALYPSNEVRRKNIANRDFVYLLMDDILFYQRPLKTKKSLIANCPYEENEYVDRETGEIKKTPLKCIAKSHPLFQEFRLWNFLSNIRIYQKEKEINGTLHLDVDVTAEFLKTEDDYVALFDWLNSRKEIEQKTFLKYPKFGLKKEISNYRWNYVEDKQYPCNETRHAILSSLEKANVCIDFLSNEKEVALWHILYSVSDKQEIEKALRTFAAKNGLDESFVEAFKKFPPFKSEYGAYSAKAIKKMLPLMRCGKYWDVSSIDDTTKERIKKIVTGEYDERISVKVRDKVMNLSDISCFRRLPLWLACYIVYNRHSEDKEAVKWESPADIDAYLASFKQHSLRNPIVEQVITETLRVVRDIWKQVGRIDEIHIELGREMKNPADKRKRMTAQILENENANLRIKALLAEFMNPEYEIENVRPYSPSQQEILRIYEDTVLHAEDQLPEEIDAILKKFNSSKVPTKSEFLRYKLWLEQKYRSPYTGELIPLGKLFTAAYEIEHVIPQSRYFDDSFSNKVICESAVNKLKDNQLGYEFIKNHHGQKVEVGFGKSVEIFSVDSYERFVKEQYAKSAVKMKKLLMDDIPEQFIERQLNDSRYISKVIKGLLSNIVREKNDSGEYEPEAVSKNIVVCTGSVTDRLKRDWGMNDVWNSIVYPRFERLNSLTDTQSFGHWENKSGKKVFQTELPLEYQKGFSKKRIDHRHHAMDAIVIACATRNHVNYLSNESASRNAKISRYDLQRLLCDKNRTDDNGNYKWVIKKPWDTFTQDAREVLSKIVVSLKQNLRIINKTTNVYRHLDATGNRVYEKQKTGDSWAIRKPMHKDTVFGAVNLRKVKVVRLSVALDTPAMIVDKRVKNKVFELLSYKYDKKRIEKYFKENAFLWKELDLAKVAVYYFTEATTEPLVAVRKPLDSTFNEKKIKESVTDTGIQKILLNHLCTKEGKPDLAFSAEGIEEMNRNLLQLNNGKSHQPIYKVRVYEPRGNKFSVGVLGNKGTKWVEAAKGTNLFFAIYITEDGKRTYETIPLNVVIEREKQGLVPVPDRNKKGDKLLFWLSPNDLVYLPTEEEREFGRINEPIDRGRIYKMVSCTGNEGHFIPANVANPIVPVIELGSNNKAQRAWTNEMIKDICIPIKVDRLGHIIEVKYRIDE

SEQ ID NO: 292 - protein, 1526 aa, Bacteroides faecis
MKKILGLDLGTNSIGWAVLNAADDNSLKYIEAAGSRIIPMDAAILGDFDRGNSISQTAERTRIRGMRHLRERYLLRRARLHRILNLLGFLPFHYAQDIDRYGNFSADMEPKIAWCKNLEGELEFIFIESFNEMLEDFRKNQPELVADNKKVPYDWVIYYLRKKALEKKISKEELAWILLNFNQKRGYYQLRGEDDDESMKTAKTRQYFDKQIIKNIIDTNQTYKGQRILIVELQNGDKGKIFKKEIPDWIGQEKNIIVTVDIDKDGNDKYEESGSLSCRFKIPTDAEWESEWKLIKMKTQKDLDESNKTVGTYIYDSILQNPTQKVRGKLVRTIERKYYKAELKQILEKQTEFHSELQDKDLYIECLNELYSNNDTHRNAITDRDFVYLFMNDILFYQRPLKSKKSLIDNCPYERNIYIDKETGEIKYSPIKCIAKSHPLFQEFRLWKFISSIRIYQRESVVEVVDKQLDLFSSQSTSVQKLVTDVDVTDKFLTCENDYVALFEWLNKKKIIDQKEFLKYRPFGLKGDIDNYRWNYVEDKSYPCNETHAMILTYFAKAGISEDILTKEMEEALWHILYSVEDRQEITKALRTFASKYHLSDSFVKVFSNIPPFKKEYGSYSAKAIKKLLSLMRMGKYWSEDAIDVNTRERIDKIVTGEYDEKIRDRVREKTIRLNDIRHFRALPDWLACYVVYDRHSETREITEWKSPEEIDEYIRNFKQHSLRNPIVEQVITETLRTVRDIWKQVGCIDEIHVELGREMKNPADKRKRITSQIIENENANLRVKALLTEFVNSEFEIENVRPYSLSQQDILRIYEDGVLNSVAEVPGDIAGILKKFNENDAKKRPTTSEILRYKLWLEQKYRSPYTGEMIPLSKLFTSAYEIEHVIPQSRYFDDSFSNKVICEAEVNKLKDNALGYEFIKKHHGEKVELGFGKIVEIFSVSVYEQFVKDNYSRNRGKMKKLLMDEIPEQFIERQLNDSRYISKVVKTLLSNVVREKAEQEAVSKNVIVCTGGVTDRLKKDWGINDVWNKIVLPRFLRLNELTNSTNFTAKNAAGNEIPAMPLELQKGFNKKRIDHRHHAMDAIVIACANRNIVNYLNNESASRKAKISRHDLQAILCDKVRTDDKGNYQWRVKKPWDTFTQDVYVALENIIVSFKQNLRVINKTSNYYWHYENGKKVLVKQVKGDSWAIRKPMHKDTVFGEVNLRKVKSVSLNEALKNPQFIVEKDLKRQLLSLLQQNFDIKKIKKYFEEHKDIWSDISLSKMNIYYFTKETKDRYFATRKPLDASFDKKKIESCITDTGIQQILLRHLELKENDPERAFSPDGIDEMNRNIIQLNKGKGHHPIAKVRVYEKADKFEVGQRGNKSSKFVEAAKGTNLFFAVYETEYPDEKTNSIVRKRNYATIPLNIAIERQKRGLSTAPEDEKGNVPSFVLSPNDLVYLPTSEDIVNGHITQPIDKSRIYKMVSSSGSQCFFIKHNIANIIVDKYEFSPLNKMERAISNEMIKEICIPVKVDRLGNIVKLGKSE

SEQ ID NO: 293 - protein, 1509 aa, Bacteroides fluxus
MKTILGLDLGTNSVGWAVINSVIKEQAERIWIEMAGSRIIPMDAAVLGDFDKGNSISQTSERTRLRGVRRLRERQLLRRERLHKVLNILGFLPNHYLEYIDFEKHPGKFLSDAEPKLPWVKDEQGKYTFLFQAAFDEMLADFAIHQPSLVSGDKKIPYDWTIYYLRKKALTEMISKEELAWILLNFNQKRGYYQLRGEEEEDNAGKSVEFYALKVLTVEATDEKKGRDVWYNVHLENGWIYRRSSSVPLDWEGQIKEFIVTTDLNPDSTPKLDKYGEVKRSFRAPKEDDWMLIKKRTEADIANTHKTVGAYIYDTLLQKPQQKIIGKLVKTVERKLYRDELSLILQKQCAFHAELQDRTLYARCVEALYPNNEVQRRNIANRDFVYLLMDDVLFYQRPLKTKKSLIANCPYEENEYVDRETGEIKKAPLKCIAKSHPLFQEFRLWNFLSNIRIYQKEKEINGTLHLDVDVTAEFLKTEDDYVALFDWLNSRKEIEQKTFLKYPKFGLKKEISNYRWNYVEDKQYPCNETRHAILSRLEKANVCIDFLSNEKEVALWHILYSVSDKQEIEKALRTFAAKNGLDESFVEAFKKFPPFKSEYGAYSAKAIKKLLPLMRCGKYWDVSSIDDTTKERIKKIVAGEYDERIAVKVRDKVMNLSDISCFKRLPLWLACYIVYNRHSEDKEAVKWESPADIDAYLASFKQHSLRNPIVEQVITETLRVVRDIWKQVGRIDEIHIELGREMKNPADKRKRMTAQILENENANLRIKALLAEFMNPEYEIENVRPYSPSQQEILRIYEDMVLHAEDQLPEEIDAILKKFNSSKVPTKSEFLRYKLWLEQKYRSPYTGELIPLGKLFTAAYEIEHVIPQSRYFDDSFSNKVICESAVNKLKDNQLGYEFIKNHHGQKVEVGFGKSVEIFSVDSYERFVKEQYAKSAVKMKKMLMDDIPEQFIERQLNDSRYISKVIKGLLSNIVREKNDSGEYEPEAVSKNIVVCTGSVTDRLKRDWGMNDVWNSIVYPRFERLNSLTDTQSFGHWENKSGKKVFQTELPLEYQKGFSKKRIDHRHHAMDAIVIACATRNHVNYLSNESASRNAKISRYDLQRLLCDKSRTDDNGNYKWVIKKPWDTFTQDAREVLSKIVVSLKQNLRIINKTTNVYRHLDATGNRVYEKQKTGDSWAIRKPMHKDTVFGAVNLRKVKVVRLSVALDAPTMIVDKRVKNKVFELLSYKYDKKRIEKYFKENAVLWKELDLARVAVYYFTEATTEPLVAVRKPLDSTFNEKKIKESVTDTGIQKILLNHLCTKEGKPDLAFSAEGIEEMNRNLLQLNNGKRHQPIYKVRVYEPRGNKFSVGVLGNKGTKWVEAAKGTNLFFAIYITEDGKRTYETIPLNMVIEREKQGLAPVPDKNEKGDKLLFWLSPNDLVYLPTEEELEFGRINEPIDRGRIYKMVSSSGNQCFFIPQSISNAIIPTKELGANNKAERSWDGAMIKNICIPVKVDRLGRIIEVKYRINE

SEQ ID NO: 294 - protein, 1436 aa, Bacteroides fragilis; identical to SEQ ID NO: 160

SEQ ID NO: 295 - protein, 1512 aa, Bacteroides nordii
MKNILGLDLGTNSIGWAVINSEEDGPIVKKRIELAGSRIIPMDAAVLGNFDSGVTKSQTAERTSFRSIRRLRERQLLRRERLHKVLQILGFLPEHYVNDIDFENHPGKIKRNTEPKLPWRKNSMGQFEFIFQDSFEAMLTDFATHQPVFVSEGKKVPYDWTLYYLRKKALTEGISKEELAWLILNFNQKRGYYQLRGEEEEEQSNKLVEFYALRVVKVEATDDKKGKDTWYNVHLENGWIYRRTSNIPLDWEGKVKEFIVTTDLNEDGTPKLDKYGEVKRSFRAPKEDDWTLIKKKTESDIANSHKTVGCYIYDALLQNPHQKIKGRLVRTVERKFYKEELRLILEKQLSFHPELQDRDLYRACIDALYVSNEAHKNNISGRDFVYLFIDDIIFYQRPLKTKKSLIDNCPYEENQYMDRETGEVKQAPIKCIAKSHPLFQEFRLWQFISNIRIYQRERVLDDGKLETDVDVTPDFLKTEDDYTTLFEWFNDRKEVDQKAFLKNPQFGLKKTFTEYRWNYVEDKSYPCNETRNAILNGLQKAGVSADFLSREVEEALWHILYSVEDKIEIESALRKFASKHDLDDRFADVFKKLPPFKKEYGAYSAKAIKKLLPLMRIGKYWELSNIDDKTKERIDKIITGEWDENIHDRVREKAIKLSDITDFKGLPLWLSCYVVYNRHSEARAIAKWESPEDIDSYLRLFRQHSLRNPIVEQVITETLRTVRDIWKRVGQIDEIHVELGREIKNPADKRAKMTAQIVENENTNLRIKALLAEFINSEYEIENVRPYSSNQQEKLKIYEDTVLNGVKEIPEDINTILKKFRESDLKKRPTKSDFLHYKLWLEQKYCSPYTGRIIPLGKLFTSAYEIEHIIPQAHYFDDSFSNKVICEAEVNGLKDKKLGYEFIKHNPGKMVEIGFGKPPVRIFSVEEYERFVKENYSGIKNKMNKLLMDDIPETFIERQLNDSRYISKVVKSLLSNIVREKDSNGEYEPEAISKNVIVCTGSVTDRLKRDWGVNDVWNSIIYPRFERLNELTGSQQFGCWENKEGKRVFQTAVPLEMQKGFSKKRIDHRHHAMDAIVIACATRNHINYLSNESASKKAKISRTDLQRLLCTKCRTDDNGNYKWIVKKPWPAFTQDIRKALENITVSFKQNLRVINKTTNYYVHFDESGKKVLEKQINGDSWAIRKPMHKDTVFGKVNLQKVKEVRLSLALDTPKMIVDKKLKEKVLQLYSYKYDKKRIDKYFKENASLWKDLNLSKVAVYYFTNDSTEPLVAVRKPLDTSFNAKKIKESVTDTGIQKILLNHLSNNQDDPNLAFSPDGIDKMNKNLTALNDGKYHQPIYKVRVCEPQGNKFSVGTSGNKTSKYVEAAKGTNLFFAVYQTEDGKRSYETIPLNVVIEREKLGWTPVPENNNNGDKLLFWLSPNDLVYVPTADELNNGMRLDNMDKGRIYKMISCSGPQCFFIPQNVSNAIIPVIELGANNKAEKSWNNEMIKVVCVPIRVDRLGCITQINNQK

SEQ ID NO: 296 - protein, 779 aa, Bacteroides oleiciplenus
MKEGNQYDVACEYAGYRHSKSSLTREEIDNKVLKNRLEILPKNSLRNPVVEKILNQMVNVVNAVIDTYGKPDEIRVELARELKKGAKEREELAKSIAQNTREHEAIRQLLQTEFGMMHVTRNDIIRYKLYEELKDNGYKTLYSDQYIPREKVFSKEIDIEHIIPQARLFDDSLSNKTLEYRAVNIEKGNKTAYDFVKEKYGNDGLRRYLNHCEALFKDKKTKLKKLKMEDQDIPDGFIDRDLRNTQYIAKKALSMLSEISRRVVATTGSITDELRKDWQLVDIMKELNLPKYEALGFVETFKDKDGRIIKKIKDWSKRNDHRHHAMDALTVAFTKDVFIQYFNNKNAFWMSGSKEHANITAIKNKYFEKGKALAPIPLELFRTEAKHHLENILVSIKAKNKVVTNNINRTKKKNGENLKLQQTPRGQLHLESIYGSYRQCIIRDEKVNASFDASKIANVSKSAYRNALLKRLEAYDNDPKKAFTGKNSLDKNPVYLDENKMEKVPDRVKIVEFETVYTIRKPIDPKLSIDKVVDARIRTLLKKRLEEYGGDAQRAFSNIEENPIWLNKEKGISVKRVAIRGISNAQALHDKKDKDGNPILDKEGKGIPTDFVNTSNNHHVAIYRKPVVDKMGQVILDENGSPRYELGEDVISFFEAVARVNLRQPVVDKDYKRSEGWQFLFSMKQNEYFVFPNEKTGFNPKEIDLLNPENYALISPNLFRVQKIGLNDYTFRHHLETSIQNNSNELKFITWIRCGKNGINGVIKVRVNHIGQIVSMGEY

SEQ ID NO: 297 - protein, 653 aa, Bacteroides oleiciplenus
MKKILGLDLGSSSIGWALVNEGANDEEKSSIIKLGVRVNPLTVDEAQNFEKGKSITTNADRTLKRGMRRNLQRYKQRREALVEVLKKHEFITAGTLMSEQGNKTTFETYRLRAKAVEEEISLEEFARVLLMINKKRGYKSSRKAKGDEDGVLIDGMDVAKKLYDEDLNPGELCLQLLEAGKKTLPDFYRSDLQDEFDKIWNFQKQFNPESFCDTAKEEVRGKNRTQTWTILSKYFVWTEGDSVWNNEEARTEERIKEYKLVGIKRTTKGYEQKLENYRWRVQALSEQLNPEIIAIVLQEINGQISASSGYLGAISDRSKELFFNHQTVGQSLMSELDKNPNGSLRNKVFYRQDYLDEFNTIWEKQSLYHKELTVELKKEIRDIIIFYQRRLKSQKGLISTCEFEQREIIVEKDGKRKTKIIGCKVIPRSHPLFQEFKIWQTLNDVEVYVADRRTKRKQDRKSTTLFSDTEDILLVEGKRYLYQEEKELLAKELFVRENMKKAEVLKLLFEDPKELDLNFKQIDGNRTGFALFSAYSKMIEKYGYESVNFKNSADEIIEKLQIIFADLGWNTELFSIDLSKDDKELEKQPYFRLWHLLYSFEGDNTPTGNGKLIEALMRLCSVEKEYASVLANVSFQEDYGSLSAKAIKKYYLI

SEQ ID NO: 298 - protein, 1436 aa, Bacteroides sp.
MKRILGLDLGTNSIGWALVDEAENKDERSSIVKLGVRVNPLTVDELTNFEKGKSITTNADRTLKRGMRRNLQRYKLRRETLMEVLKEHKLITEDTILSENGNRTTFETYRLRAKAATEKISLEEFARVLLMINKKRGYKSCRKAKGAEEGTLIDGMDIARELYNNNLTPGELCLQLLDAGKKYLPDFYRSDLQNELDRIWEKQKEYYPEILTEVLKEELRGKKRDAVWAICAKSFVWEEYYTEWNKEKGKTEQQEREHKLEGIYSKRKRDEAKRENLQWRVNGLKEKLSLEQLVIVLQEMNIQINNSSGYLGAISDRSKELYFNKQTVGQYQMEMLDKNPNASLRNMVFYRQDYLDEFNTLWEKQAEYHKELTGELKKEIRDIVIFYQRRLKSQKGLVGFCEFESRQIEVEIDGKKKIKTVGNRVIPRSSPLFQEFKIWQILNNIEVTVVGKKGKRRKQKDNSPTLFDGLDDTEQLELNGSRYLYQEEKELLAQELFVRDKMTKSDVLKLLFDNPQELDLNFKTIDGNKTGYTLFQAYSKMIEMSGHEPVDFKKTVEKVVEHVKAVFDLLNWNTDILGFNSNEELDNQSYYKLWHLLYSFEGDNTPTGNARLVQKITELYGFEKEYAIILANVTFQDDYGSLSAKAIHKILPHLKEGNRYDVACAYAGYKHSESSLTKEEIANKALKDRLTLLPKNNLRNPVVEKILNQMVNVINAIIDTYGKPDEIRVELARELKKNAKEREELTKFIAETTRKHEEFKILLQSEFGLTNVSRTDILRYKLYKELESCGYKTLYSNTYIPREKLFSKEFDIEHIIPQARLFDDSFSNKTLEARSINLEKGNKTAYDFVKEKFGESGADNSLDHYLNNIEDLFKSGKISKTKYNKLKMAEQDIPDGFINRDLRNTQYIAKKALSMLNEISRRVVATSGTITDKLRQDWQLVDVMKELNWEKYKALGLVEYFEDKDGRQIGRIKDWTKRNDHRHHAMDALTVAFTKDIFIQYFNNKNASLNSNTNEYAIKNKYFQNGRAIAPIPLREFRVEAKKHLENTLISIKAKNKVVTGNINKTKKRGGVNKYLQQTPRGQLHLETIYGSGKQYLTKEEKVNASFDMKKIATVSKSAYRDVLLKRLHENDNDPKKAFTGKNSLDKQPIWLDKEQTRKVPEKVKTVTLETIYTVRKEISPDLKVDKVIDAGVRKILTGRLNEYGNDAKKAFSNLDENPIWLNKEKGISIKRVTISGISNAQSLHVKKDKDGKPILDEDSRNIPVDFVNTGNNHHVAVYRRPVIDKRGQLVIDEAGNPKYELEEVVVSFFEAVTRANLGQPIIDKDYKTSEGWQFLFSMKQNEYFVFPNEKTGFNPKEIDLLDAENYGVISPNLFRVQKFAHKNYVFRHHLETTIKDTSSILKGITWIDFRSSKGLDAIVKVRVNHIGQIVSVGEY

SEQ ID NO: 299 - protein, 1510 aa, Bacteroides sp.
MKRILGLDLGTNSIGWALVDSEEQRILGMGSRIIPMDQGVLDTFSGGNPVETQTAARTAYRGTRRLRERALLRRERLIRVLNMMKFLPEHYASQIDFEKRLGQFFDEKEPKLAWKQNDEGRFEFIFQQSFNEMIEEFKNKGVVREDKKIPYDWTIYYLRKKALSQEIEKEELAWILLNFNQKRGYYQLRGEEEEENPNKLVEYYSLKIVDVIADEKPNSKGDIWYSLHLENGWIYRRSSKIPLFGWKDKTRDFIVTTDLNDDGTVKKDKEGIEKRSFRAPSENDWVLLKKKTESDIEKSHKTVGAYVYETLLQNPMQKVRGKLVRTIERKFYKDELKQILEKQREFHPELRDEDLYNDCVRELYRSNETYQFILSKRDFVHLFLDDILFYQRPLRSQKSAIGDCILEFKTYKDKDGNNIKEYLKVISKSNPLYQEFRIWQWLYNLKIYRKEDDEDVTLQFIANIEDKEQLFDFLSNRKSIEQKPLLEYLIKAKGLKKQVKTEAYRWNYVEDKIYPCSETKTMISTRLAKVENIPDNFFTKEIEQKLWHIIYSVTDKNEFEKALRTFAKKYDLDIASFVDNFKKIPPFKNEYGSFSEKAIKKLLPLMRLGKYWKWNDIDNNTQNRISKIITGEYDEEIKDIVREKSIALTNENDFQGLQLWLAQYLVYGRHSEADIAGKWHSVADLEKYLNEFKQHSLRNPIVEQIITETLRVVRDIWRKYGQGAENFFSEIHVELGRDMKNTADERKKIVNVVTENENTNLRIKALLMELKNNSDGKLEVENVRPYSPTQQDILKIYEEYAISTGLDNEKDEKVKEDIKKISRVAQPTTTELQRYKLWLEQKYCSPYTGKVIPLGKLFTEEYQIEHIIPKSRYYDDSFSNKVICEAAVNKLKDKCLGLEFIKNYHGQIVETGFGQKVTIFDEEAYQNFVKQHYAYNRSKRTKLLLEEIPEKMIERQMNDTRYISKFVLPLLSNLVRAEENDNGVNSKNVLPVNGKITTMLKQDWGLNDVWNDLILPRFVRMNELAKTIAFTSWNEQHQKYLPTVPLELSKGFQKKRIDHRHHAMDALVIACATRDHVNLLNNKHANTDTIRYDLQRKLRLFERVTYIDPQTKNNVTKDIPKEFKKPWDNFTVDARNELEKIIVSFKQNLRIINKATNIYTKYENGKKIKVGQKGLNWAIRKPLHKETVFAKVSLRKRKTVRLSEALKDWKKIVDKKLKQEIKRLTCQYGKFDVDTILRYFKDRKYQFGEVDVSKVKMYYFDEENAAVRKNVDTSFTEKFIQGSVTDTGIQKILLNHLEAKGNKVEIAFSPEGIEEMNKNIIQLNEGKLHLPIFKVRVYETIGNKFSVGVKGNKKDKYVEAAKGTNLFFAIYVDENGIRSYETIPLNIVIERLKQGLSVVPEKNRKEHSLLFYLSPNDLVYVPIEDERENIHAVNLDQLNNEQRKRIYKMVSCTGSECHFVPYYVASPIVNKVEYSSLNKIGRSLTGEMIKDVCIKLKVDRLGNVKGISGL

SEQ ID NO: 300 - protein, 1436 aa, Bacteroides sp.
MKRILGLDLGTNSIGWALVNEAENKDERSSIVKLGVRVNPLTVDELTNFEKGKSITTNADRTLKRGMRRNLQRYKLRRETLTEVLKEHKLITEDTILSENGNRTTFETYRLRAKAVTEEISLEEFARVLLMINKKRGYKSSRKAKGVEEGTLIDGMDIARELYNNNLTPGELCLQLLDAGKKFLPDFYRSDLQNELDRIWEKQKEYYPEILTDVLKEELRGKKRDAVWAICAKYFVWKETYTEWNKEKGKTEQQEREHKLEGIYSKRKRDEAKRENLQWRVNGLKEKLSLEQLVIVFQEMNTQINNSSGYLGAISDRSKELYFNKQTVGQYQMEMLDKNPNASLRNMVFYRQDYLDEFNMLWEKQAVYHKELTEELKKEIRDIIIFYQRRLKSQKGLIGFCEFESRQIEVDIDGKKKIKTVGNRVISRSSPLFQEFKIWQILNNIEVTVVGKKRKRRKLKENYSAIFEELNDAEQLELNGSRRLCQEEKELLAQELFVRDKMTKSEVLKLLFDNPQELDLNFKTIDGNKTGYALFQAYSKMIEMSGHEPVDFKKPVEKVVEYIKAVFDLLNWNTDILGFNSNEELDNQSYYKLWHLLYSFEGDNTPTGNGRLIQKMTELYGFEKEYATILANVSFQDDYGSLSAKAIHKILPHLKEGNRYDVACVYAGYRHSESSLTREEIANKVLKDRLMLLPKNSLHNPVVEKILNQMVNVINVIIDIYGKPDEIRVELARELKKNAKEREELTKSIAQTTKANEEYKTLLQTEFGLTNVSRTDILRYKLYKELESCGYKTLYSNTYISREKLFSKEFDIEHIIPQARLFDDSFSNKTLEARSVNIEKGNKTAYDFVKEKFGESGADNSLEHYLNNIEDLFKSGKISKTKYNKLKMAEQDIPDGFIERDLRNTQYIAKKALSMLNEISHRVVATSGSVTDKLREDWQLIDVMKELNWEKYKALGLVEYFEDRDGRQIGRIKDWTKRNDHRHHAMDALTVAFTKDVFIQYFNNKNASLDPNANEHAIKNKYFQNGRAIAPMPLREFRAEAKKHLENTLISIKAKNKVITGNINKTRKKGGVNKNMQQTPRGQLHLETIYGSGKQYLTKEEKVNASFDMRKIETVSKSAYRDALLKRLYENDNDPKKAFAGKNSLDKQPIWLDKEQMRKVPEKVKIVTLEAIYTIRKEISPDLKVDKVIDVGVRKILIDRLNEYGNDAKKAFSNLDKNPIWLNKEKGISIKRVTISGISNAQSLHVKKDKDGKPILDENGRNIPVDFVNTGNNHHVAVYYRPVIDKRGQLVVDEAGNPKYELEEVVVSFFEAVTRANLGLPIIDKDYKTTEGWQFLFSMKQNEYFVFPNEKIGFNPKEIDLLDVENYGLISPNLFRVQKFSLKNYVFRHHLETTIKDTSSILRGITWIDFRSSKGLDTIVKVRVNHIGQIVSVGEY

SEQ ID NO: 301 - protein, 1424 aa, Bacteroides sp.
MKRILGLDLGTNSIGWALVNEAETDEEVSSIIRLGVRVNPLTVDETQNFEKGKSITTNAERTLKRSMRRNLQRYKLRRDALVEFLKELGFITDETILSEQGNRTTFETCRLRAKAAEEEISLEELSRVLLMINKKRGYKSSRKVKKEEDGVLIDGMEIAKKLYEEDLTPGQLCSQLLESGKKVLPDFYHSDLQEELDRIWSVQKQFHPDVFCDAAKEEIKGKNRSQTWAILANYFVWKEEVVGWNDREAKNETIEKECKLVGLKRTTKGYELKKENYRWRAQALTEQLGLEEIAVVLQEINGQINASSGYLGAISDRSKVLYFNHQTVGQYQMAELDKNPHASLRNMVFYRQDYLDEFDRIWEKQAEFHKELTAELKKEIRDMIIFYQRRLKSQKGLISFCEFERLEIVVEKDGKKQTKVIGCKVIPRSHPLFQEFKVWQTLNDIKVLGREKKRNALSASESRALYPEEKEILARELAIKENMKKADVLKLLFENPQELDLNFKQIDGNRTGFSLFSAYSKMIEKYGYEPLDFKKPADEIIGQLRTIFTDLGWNTNLFTIDLTKEGKELEMQPYFRLWHLLYSFEGDNTSTGNGKLIEKIMQLCGVEKEYAVELASLSFQDDYGSLSAKAIKRILPYLKEGNLYDVACEYAGYRHSKSSLTKEEIENKVLKGKLEVLPKNSLRNPVVEKILSQMVNVINTIIDTYGKPDEIRVELARELKKSAKEREELTKAIAKSTREHEEIRKLLQDEFGMMNVSRNDIIRYKLYEELKDNGYKTLYSNQYIPKEKIFSKEIDIEHIIPQSRLFDDSLSNKTLEYKAINIEKGNKTAYDFVKEKYGEEGLQQYINRCESLFNDKKAKLRKLKMEQKDIPDGFIDRDLRNTQYIAKKALAMLNEICRRVVATTGSITDQLREDWQLVDVMKELNLPKYEALGFVETYEDKDGRKIKRIKDWTKRNDHRHHAMDALTVAFTKDAFIQYFNNKNAAQDSGNRNHTNIIGIKTRYFDKGRALPPIPLEQFRIEAKQHLEKLLVSIKAKNKVVTVNVNRTKKRKGENTKIQQTPRGQLHLETVYGSHKQYVTKIEKVNASFDAAKIATVSKRAYRNALLKRLETFGNDPKKAFTGKNALEKNPLYADKYQTIRVPEKVQTVEFETIYTIRKPVDPALNVDKVVDVKVRAILERRLKEYGGDPKKAFVNFWENPIWLNKEKGISIKRVSIRGINNAQSIHVKKDKNGNPIWDENGKQIPVDFVNTGNNHHVAIYRKPVLDKKGQVTFDEDGNLMYELDEVVVPFFEAVTRANLGLPIIDKDYRKSEGWQFLFSMKQNEYFVFPNEKTGFNPKEVDLLNPDNYAMISPNLFRVQTMSKVMYGNNVVRDYKFRHHLETTVKDMKELKDIAYKQYKTLSFGNSVVKIRINHIGQIVSVGEY

SEQ ID NO: 302 - protein, 1055 aa, Bacteroides sp.
MRIYRKDLAQDVDVTNELLKTEEDYVALFDWLNGKKEIDQKAFLKYPLFGLKKEVENYRWNYVQDKPYPCNETRSSMLARLEKCDISIEFLTKENEEALWHILYSVEDKNEIVKALQKFADKHDLNASFVDVFQKFPPFKKEYGSYSAKAIKKLLPLMRMGKYWSENSIDKGTRERMDKIITGEYDEKIENRVREKAIHLADVSDFKGLPLWLVCYIVYGRHSEAKEITQWKSPADIDLYLRSFKQHSLRNPIVEQIIIETLRVVRDIWKQVGNIDEIHVELGREMKNPADKRKKMTQQMSENENTNLRIKYLLTEFLNPEYEVENVRPYSPSQQDILRIYEEGVLNSVSDLPEEISDILKKFTETDLKKRPSRSEVLRYKLWLEQKYRSPYTGEVIPLGKLFTPAYEIEHVIPQSCYFDDSFSNKVICEAEVNKLKSNLLGHEFIVKHHGEIVELPFGKKVRIFTVDEYEQFVKDNYSRTRSKMKKLLMDDIPEEFVARQLNDSRYISKVVKSLLSNIVREKGEEEAISKNVIPCTGGVTDRLKKDWGINEVWNKIILPRFQRLNELTGTNKFTTKNVGIQEIPTMPLELQKGFNKKRIDHRHHAMDAIIIACANRNIINYLNNESATAKAELSRYDLQKMLCDKAKTDNNGNYKWVIRKPWASFTQDTYLALENIIVSFKQNLRVINKATNHFLHYNEEGKKIFVKQGKGDNWAIRKSMHKDTVFGEVNLRRIKTVALNEAMKNPQSIVVKDFKRKLLELWNLGFDAKRIKKYFEDNRETWSDINLSKIEVYYFSKDTKDRFFATRKPLDTSFDRKKIENNITDTGIQKILLRHLELKDNNPDIAFSPDGIDEMNRNIIQLNNGKYHQPIIKVRWYEQADKFAVGQTGNKSSKFVEAAKGTNLFFAVYESNILDKKTNTIIKKRNYATIPLNVAIERQKQGLPVAPEDENGNDPIFVLSPNDLVYLPTAADLANGIIAQPLDRGRIYKMVSCTGNEGYFIPARIANPILQTIELGSNNKAQKAWTDEMIKEICMPIKVDRLGNVLESSSSYKK

SEQ ID NO: 303 - protein, 1055 aa, Bacteroides sp.
MRIYRKDLAQDVDVTNELLKTEEDYVALFDWLNGKKEIDQKAFLKYPVFGLKKEIENYRWNYVQDKPYPCNETRSLMLARLEKCDISIEFLTKENEEALWHILYSVEDKNEIVKALQKFADKHDLNASFVDVFQKFPPFKKEYGSYSAKAIKKLLPLMRMGKYWSENSIDKGTRERIDKIITGEYDEKIENRVREKAIHLADVSDFKGLPLWLVCYIVYGRHSEAKEIIQWKSPADIDSYLRSFKQHSLRNPIVEQIIIETLRVVRDIWKQVGNIDEIHVELGREMKNPADKRKKMTQQMSENENTNLRIKYLLTEFLNPEYEVENVRPYSPSQQDILRIYEEGVLNSVSDLPEEISDILKKFTETDLKKRPSRSEVLRYKLWLEQKYRSPYTGEVIPLGKLFTPAYEIEHVIPQSCYFDDSFSNKVICEAEVNKLKSNLLGHEFIVKHHGEIVELPFGKKVRIFTVDEYEQFVKDNYSRTRSKMKKLLMDDIPEEFVTRQLNDSRYISKVVKSLLSNIVREKGEEEAISKNVIPCTGGVTDRLKKDWGINEVWNKIILPRFQRLNELTGTNKFTTKNVGIQEIPTMPLELQKGFNKKRIDHRHHAMDAIIIACANRNIINYLNNESATAKAELSRYDLQKMLCDKAKTDNNGNYKWVIRKPWASFTQDTYLALENIIVSFKQNLRVINKATNRFLHYNEEGKKIFVKQGKGDNWAIRKSMHKDTVFGEVNLRRIKTVALNEAMKNPQSIVVKDFKRKLLELWNLGFDAKRIKKYFEDNRETWSDINLSKIEVYYFSKDTKDRFFATRKPLDTSFDRKKIENNITDTGIQKILLRHLELKDNNPDIAFSPDGIDEMNRNIIQLNNGKYHQPIIKIRWYEQADKFAVGQTGNKSSKFVEAAKGTNLFFAVYESNILDKKTNTIIKKRNYATIPLNVAIERQKQGLPVAPEDENGNDPIFVLSPNDLVYLPTDDELANGIIAQPLDRGRIYKMVSSSGEQCFFIKHIVANVLVDKFEFSPLNKMERALTGEMIKMICIPIKVDRLGNVLESSSSYKK

SEQ ID NO: 304 - protein, 286 aa, Bacteroides uniformis
MLSYKYDKKKIEKYFKENAFLWKELDIAKVAVYYFTENTTEPLVAVRKSLDSTFNEKKIASVTDTGIQKILLNHLKSKEGKAELAFSAEGIEEMNRNLLQLNDGKGHQPIYKVRVYEPRGNKFKVGVLGNKGAKWVEAAKGTNLFFAIYITEDGNRTYETIPLNWVIEREKQGLVPVPDRNEKGDKLLFWLSPNDLVYLPTEEERDFGRINEPIDRGRIYKMVSSSGNQCFFIPQSISNAIISTKELGSNNKAEKSWDGEMIKNICIPVKVDRLGRIIEVKYRVNE

SEQ ID NO: 305 - protein, 1508 aa, Bacteroides uniformis
MRTILGLDLGTNSIGWAVINSVIKEQTERIWIEMAGSRIIPMDAAILGDFDKGNSISQTAERTRFRGVRRLRERQLLRRERLHKVLKILGFLPEHYLKGIDFEKHTGKFLSGSEPKLPWVKDRWGKYSFLFQTAFNEMLADFAKHQPSLVFDGKKIPYDWTVYYLRKKALTEMISKEELAWILLNFNQKRGYYQLRGEEEEDNAGKSVEFYALKVLSVEATDEKKGRDIWYNVHLENGWVYRRSSNVPLDWEGRVKEFIVTTDLNPDGTPKLDKYGEVKRSFRAPKEDDWMLIKKRTEADITGTHKTIGSYIYDALLQEPQQKIIGKLVKTVERKFYKEELNFILQKQCAFHAELQDRDLYMRCIEALYPGNEVQRRNIANRDFIYLLIDDVLFYQRPLKTKKSLIANCPYEENEYVNRKTGEIKTAPLKCIAKSHPLFQEFRLWYFLSNIRVYQKEREVNGTLHLDVDVTTEFLKTEDDYVALFDWLNSRKEIDQKAFLRYPAFGLKKEINNYRWNYVEDKFYPCNETRHAILSRLEKAGIGIDFLSDEKETALWHILYSVSDKQEIEKALATFAVKNGLNESFVEVFKKFPPFKSEYGAYSAKAIKKLLPLMRCGKYWDMSLIDGTTKERIERIIAGECDESIGAKVREKAMNLSDISCFKRLPLWLACYVVYNRHSEDKEITKWETPADIDAYLAAFKQHSLRNPIVEQVITETLRVVRDIWKQVGKIDEIRIELGREMKNPADKRKRMTTQILENENANLRIKALLAEFVNPEYGVENVRPYSPSQQEILRIYEDAVLKGEEQIPEDIDVILKKFNTSKLPTKSEFLRYKLWLEQKYRSPYTGELIPLAKLFTAAYEIEHVIPQSRYFDDSFSNKVICESAVNKLKDNQLGYEFIKNHHGQKVEVGFGKTVEIFSVDSYERFVKEQYAKSGIKMKKLLMDDIPEQFIERQLNDSRYISKVVKGLLSNIVREKNDSGEYEPEAVSKNILVCTGSVTDRLKKDWGMNDVWNSIVSPRFERLNALTETQCFGHWENKDGKKVFQTAVPLEYQKGFSKKRIDHRHHAMDAIVIACATRNHVNYLNNESASRNAKISRYDLQRLLCDKSRGDGNGNYRWIIKKPWTTFTQDAREALSGIIVSLKQNLRIINKTTNIYQHFDANGTRVYEKQKIGDSWAIRKPMHKDTVFGAVNLRKVKVVRLSVALDTPSMIVNKRVKNKVLELLSYKYDKKKIEKYFKENAFLWKELDIAKVAVYYFTENTTEPLVAVRKSLDSTFNEKKIASVTDTGIQKILLNHLKSKEGKAELAFSAEGIEEMNRNLLQLNDGKGHQPIYKVRVYEPRGNKFKVGVLGNKGAKWVEAAKGTNLFFAIYITEDGNRTYETIPLNWVIEREKQGLVPVPDRNEKGDKLLFWLSPNDLVYLPTEEERDFGRINEPIDRGRIYKMVSSSGNQCFFIPQSISNAIISTKELGSNNKAEKSWDGEMIKNICIPVKVDRLGRIIEVKYRVNE

SEQ ID NO: 306 - protein, 1210 aa, Bacteroides uniformis
MRTILGLDLGTNSIGWAVINSVIKEQTERIWIEMAGSRIIPMDAAILGDFDKGNSISQTAERTRFRGVRRLRERQLLRRERLHKVLKILGFLPEHYLKGIDFEKHTGKFLSGSEPKLPWVKDRWGKYSFLFQTAFNEMLADFAKHQPSLVFDGKKIPYDWTVYYLRKKALTEMISKEELAWILLNFNQKRGYYQLRGEEEEDNAGKSVEFYALKVLSVEATDEKKGRDIWYNVHLENGWVYRRSSNVPLDWEGRVKEFIVTTDLNPDGTPKLDKYGEVKRSFRAPKEDDWMLIKKRTEADITGTHKTIGSYIYDALLQEPQQKIIGKLVKTVERKFYKEELNFILQKQCAFHAELQDRDLYMRCIEALYPGNEVQRRNIANRDFIYLLIDDVLFYQRPLKTKKSLIANCPYEENEYVNRKTGEIKTAPLKCIAKSHPLFQEFRLWYFLSNIRVYQKEREVNGTLHLDVDVTTEFLKTEDDYVALFDWLNSRKEIDQKAFLRYPAFGLKKEINNYRWNYVEDKFYPCNETRHAILSRLEKAGIGIDFLSDEKETALWHILYSVSDKQEIEKALATFAVKNGLNESFVEVFKKFPPFKSEYGAYSAKAIKKLLPLMRCGKYWDMSLIDGTTKERIERIIAGECDESIGAKVREKAMNLSDISCFKRLPLWLACYVVYNRHSEDKEITKWETPADIDAYLAAFKQHSLRNPIVEQVITETLRVVRDIWKQVGKIDEIRIELGREMKNPADKRKRMTTQILENENANLRIKALLAEFVNPEYGVENVRPYSPSQQEILRIYEDAVLKGEEQIPEDIDVILKKFNTSKLPTKSEFLRYKLWLEQKYRSPYTGELIPLAKLFTAAYEIEHVIPQSRYFDDSFSNKVICESAVNKLKDNQLGYEFIKNHHGQKVEVGFGKTVEIFSVDSYERFVKEQYAKSGIKMKKLLMDDIPEQFIERQLNDSRYISKVVKGLLSNIVREKNDSGEYEPEAVSKNILVCTGSVTDRLKKDWGMNDVWNSIVSPRFERLNALTETQCFGHWENKDGKKVFQTAVPLEYQKGFSKKRIDHRHHAMDAIVIACATRNHVNYLNNESASRNAKISRYDLQRLLCDKSRGDGNGNYRWIIKKPWTTFTQDAREALSGIIVSLKQNLRIINKTTNIYQHFDANGTRVYEKQKIGDSWAIRKPMHKDTVFGAVNLRKALIPQHYNLTLFISS

SEQ ID NO: 307 - protein, 1504 aa, Bacteroides vulgatus
MKNIVGLDLGTNSIGWAVVNGSVNDDGSEQLVKIQASGSRIIPMDAAMIGDFNKGNSISQTAERTRLRGVRRLSERYLLRRERLHRILDILGFLPFHFAQDLDRHGKIVKGKEPKLAWRKNEAGQFEFIFQDSFKEMLEDFKLNHPNLITDDKKVPYDWTIYYLRKKGLTSKISKEELAWILLNFNQKRGYYQLRGEEEEENKNKLVEFYALKVVAVEDSGEKKGKDIWYNVHLENGWVYRRTSNMPLDWVGKTKEFIVTTDLEKDGTPKKDKEGNVKRSFRAPKEDDWSLLKKKTEADIDQTHKTVGVYIYDTLLGNPSQKIRGRLVRTIERKYYKEELKQILEKQKEFHLELQDRALYAACIEELYPINEAHRNNVGNRDFTYLFLEDILFYQRPLKSKKSLIDNCPYEENQGLDKETGEIKSFPVKCIAKSHPLFQEFRLWQFIVNLRIYRKDLAQDVDVTNELLKTEEDYVALFDWLNGKKEIDQKAFLKYPVFGLKKEIENYRWNYVQDKPYPCNETRSLMLARLEKCDISIEFLTKENEEALWHILYSVEDKNEIVKALQKFADKHDLNASFVDVFQKFPPFKKEYGSYSAKAIKKLLPLMRMGKYWSENSIDKGTRERIDKIITGEYDEKIENRVREKAIHLADVSDFKGLPLWLVCYIVYGRHSEAKEITQWKSPADIDSYLRSFKQHSLRNPIVEQIIIETLRVVRDIWKQVGNIDEIHVELGREMKNPADKRKKMTQQMSENENTNLRIKYLLTEFLNPEYEVENVRPYSPSQQDILRIYEEGVLNSVSDLPEEISDILKKFTETDLKKRPSRSEILRYKLWLEQKYRSPYTGEVIPLGKLFTPAYEIEHVIPQSCYFDDSFSNKVICEAEVNKLKSNLLGHEFIVKHHGEIVELPFGKKVRIFTVDEYEQFVKDNYSRTRSKMKKLLMDDIPEEFVTRQLNDSRYISKVVKSLLSNIVREKGEEEAISKNVIPCTGGVTDRLKKDWGINEVWNKIILPRFQRLNELTGTNKFTTKNVGIQEIPTMPLELQKGFNKKRIDHRHHAMDAIIIACANRNIINYLNNESATAKAELSRYDLQKMLCDKAKTDNNGNYKWVIRKPWASFTQDTYLALENIIVSFKQNLRVINKATNRFLHYNEEGKKIFVKQGKGDNWAIRKSMHKDTVFGEVNLRRIKTVALNEAMKNPQSIVVKDFKRKLLELWNLGFDAKRIKKYFEDNRETWSDINLSKIEVYYFSKDTKDRFFATRKPLDTSFDRKKIENNITDTGIQKILLRHLELKDNNPDIAFSPDGIDEMNRNIIQLNNGKYHQPIIKIRWYEQADKFAVGQTGNKFSKFVEAAKGTNLFFAVYESNILDKKTNTIIKKRNYATIPLNVAIERQKQGLPVAPEDENGNDPIFVLSPNDLVYLPTDDELANGIIAQPLDRGRIYKMVSCTGNEGHFIPARIANPILQTIELGSNNKAQKAWTDEMIKEICMPIKVDRLGNVLESSSSYKK

SEQ ID NO: 308 - protein, 1153 aa, Barnesiella intestinihominis
MKNILGLDLGLSSIGWSVIRENSEEQELVAMGSRVVSLTAAELSSFTQGNGVSINSQRTQKRTQRKGYDRYQLRRTLLRNKLDTLGMLPDDSLSYLPKLQLWGLRAKAVTQRIELNELGRVLLHLNQKRGYKSIKSDFSGDKKITDYVKTVKTRYDELKEMRLTIGELFFRRLTENAFFRCKEQVYPRQAYVEEFDCIMNCQRKFYPDILTDETIRCIRDEIIYYQRPLKSCKYLVSRCEFEKRFYLNAAGKKTEAGPKVSPRTSPLFQVCRLWESINNIVVKDRRNEIVFISAEQRAALFDFLNTHEKLKGSDLLKLLGLSKTYGYRLGEQFKTGIQGNKTRVEIERALGNYPDKKRLLQFNLQEESSSMVNTETGEIIPMISLSFEQEPLYRLWHVLYSIDDREQLQSVLRQKFGIDDDEVLERLSAIDLVKAGFGNKSSKAIRRILPFLQLGMNYAEACEAAGYNHSNNYTKAENEARALLDRLPAIKKNELRQPVVEKILNQMVNVVNALMEKYGRFDEIRVELARELKQSKEERSNTYKSINKNQRENEQIAKRIVEYGVPTRSRIQKYKMWEESKHCCIYCGQPVDVGDFLRGFDVEVEHIIPKSLYFDDSFANKVCSCRSCNKEKNNRTAYDYMKSKGEKALSDYVERVNTMYTNNQISKTKWQNLLTPVDKISIDFIDRQLRESQYIARKAKEILTSICYNVTATSGSVTSFLRHVWGWDTVLHDLNFDRYKKVGLTEVIEVNHRGSVIRREQIKDWSKRFDHRHHAIDALTIACTKQAYIQRLNNLRAEEGPDFNKMSLERYIQSQPHFSVAQVREAVDRILVSFRAGKRAVTPGKRYIRKNRKRISVQSVLIPRGALSEESVYGVIHVWEKDEQGHVIQKQRAVMKYPITSINREMLDKEKVVDKRIHRILSGRLAQYNDNPKEAFAKPVYIDKECRIPIRTVRCFAKPAINTLVPLKKDDKGNPVAWVNPGNNHHVAIYRDEDGKYKERTVTFWEAVDRCRVGIPAIVTQPDTIWDNILQRNDISENVLESLPDVKWQFVLSLQQNEMFILGMNEEDYRYAMDQQDYALLNKYLYRVQKLSKSDYSFRYHTETSVEDKYDGKPNLKLSMQMGKLKRVSIKSLLGLNPHKVHISVLGEIKEIS

SEQ ID NO: 309 - protein, 1352 aa, Belliella baltica
MKKILGLDLGTTSIGWAFIKEPEKDVVGSEIVDMGVRIVPLSSDEENDFAKGNTISINADRTLKRGARRNLQRFKQRRNALLEIFKEKKLISTNFKYAEDGPSSTFSTLNLRAKAAKEKIELQDLVKVLLQINKKRGYKSSRKAKSEEDDGSAIDSMGIAKELYENDLTPGQWVYEALQKGRKNVPDFYRSDLQEEFKKIVNYQSEFFPDIFNASFVEDWMGKASTPTKQYFNKKGVQLAENKGKREERRLQEYKWRAEAVNFKIDLSEIALILSQINSQISNSSGYLGAISDRSKELYFKNLTVGQYLYQQIKKNPHTRLKGQVFYRQDYLDEFERIWSVQSSFYPQLNDALKREVRDITIFFQRRLKSQKHLISNCEFEDHHKVVPKSHPVFQEFRIWQNLNNLLLIKKDNLNEKFDLELESKIALANELAFKRELNVKDALKILGLKPNEWEFNFTKIEGNRTNQAFFDAFAKIIELEDGEPIDLGDLKADDILDQFSEAFLRIGIDTELLQVNSDIEGAEYEKQSYIQFWHLLYSSEDDQKLKLNLIRKFGFKPEHAKILASISLQDDHASLSSRAIKKILPHLQSGLIYDKACTYAGYNHSSSFTKDENEKRELRAELELLKKNSLRNPVVEKILNQMINVVNAILKDPELGRPDEIRVEMARELKANAEQRKNMTSNIASATRDHDKYREILKSEFGLKRVTKNDLLRYKLWLETDGISLYTGKPIEASKLFSKEYDIEHIIPKARLFDDSFSNKTICERQLNIDKANVTAFSFLQNKLSADEFEQYQSRVKSLYGKLSKAKIQKLLMANDKIPEDFIARQLQETRYISKKAKEILFEISRRVSVTTGTITDKLREDWGLVEIMKELNWEKYDKLGLTYTIEGKHGERLNKIKDWSKRNDHRHHAMDALTVALTKPAYIQYLNNLNAKGLNNKKGTEVFAIEQKYLKRENGKLCFIPPIENIRSEAKKHLSRILVSYKAKNKVVTINKNKTKSKAGLNEQIALTPRGQLHKETVYGKSFHYSTKFEKIGASFNVQKINTVAKKEEREALLKRLAENGNDPKKAFTGKNTLNKMPIYLDLGKNIKLSEKVKTVVLEQNYTIRKNIDPDLKVDKVIDVGIKRILESRLEEFGGNAKLAFSNLEENPIWLNKEKGISIKRVKISGVSNVESLHVKKDHFGEPILDQEGNEIPVDFVSTGNNHHVAIYEDENGNLQEEVVSFFEAVVRQNQGLPIIKKNHTLGWKFLFTLKQNEYFVFPSDDFVPADVDLMDEQNYHLISPNLFRVQKIARKNYVFNNHLETKAVDNDLLKSKKELSKITYHFYQTPEHLRGIIKIRINHLGKIIQIGEY

SEQ ID NO: 310 - protein, 1415 aa, Bergeyella zoohelcum
MKHILGLDLGTNSIGWALIERNIEEKYGKIIGMGSRIVPMGAELSKFEQGQAQTKNADRRTNRGARRLNKRYKQRRNKLIYILQKLDMLPSQIKLKEDFSDPNKIDKITILPISKKQEQLTAFDLVSLRVKALTEKVGLEDLGKIIYKYNQLRGYAGGSLEPEKEDIFDEEQSKDKKNKSFIAFSKIVFLGEPQEEIFKNKKLNRRAIIVETEEGNFEGSTFLENIKVGDSLELLINISASKSGDTITIKLPNKTNWRKKMENIENQLKEKSKEMGREFYISEFLLELLKENRWAKIRNNTILRARYESEFEAIWNEQVKHYPFLENLDKKTLIEIVSFIFPGEKESQKKYRELGLEKGLKYIIKNQVVFYQRELKDQSHLISDCRYEPNEKAIAKSHPVFQEYKVWEQINKLIVNTKIEAGTNRKGEKKYKYIDRPIPTALKEWIFEELQNKKEITFSAIFKKLKAEFDLREGIDFLNGMSPKDKLKGNETKLQLQKSLGELWDVLGLDSINRQIELWNILYNEKGNEYDLTSDRTSKVLEFINKYGNNIVDDNAEETAIRISKIKFARAYSSLSLKAVERILPLVRAGKYFNNDFSQQLQSKILKLLNENVEDPFAKAAQTYLDNNQSVLSEGGVGNSIATILVYDKHTAKEYSHDELYKSYKEINLLKQGDLRNPLVEQIINEALVLIRDIWKNYGIKPNEIRVELARDLKNSAKERATIHKRNKDNQTINNKIKETLVKNKKELSLANIEKVKLWEAQRHLSPYTGQPIPLSDLFDKEKYDVDHIIPISRYFDDSFTNKVISEKSVNQEKANRTAMEYFEVGSLKYSIFTKEQFIAHVNEYFSGVKRKNLLATSIPEDPVQRQIKDTQYIAIRVKEELNKIVGNENVKTTTGSITDYLRNHWGLTDKFKLLLKERYEALLESEKFLEAEYDNYKKDFDSRKKEYEEKEVLFEEQELTREEFIKEYKENYIRYKKNKLIIKGWSKRIDHRHHAIDALIVACTEPAHIKRLNDLNKVLQDWLVEHKSEFMPNFEGSNSELLEEILSLPENERTEIFTQIEKFRAIEMPWKGFPEQVEQKLKEIIISHKPKDKLLLQYNKAGDRQIKLRGQLHEGTLYGISQGKEAYRIPLTKFGGSKFATEKNIQKIVSPFLSGFIANHLKEYNNKKEEAFSAEGIMDLNNKLAQYRNEKGELKPHTPISTVKIYYKDPSKNKKKKDEEDLSLQKLDREKAFNEKLYVKTGDNYLFAVLEGEIKTKKTSQIKRLYDIISFFDATNFLKEEFRNAPDKKTFDKDLLFRQYFEERNKAKLLFTLKQGDFVYLPNENEEVILDKESPLYNQYWGDLKERGKNIYVVQKFSKKQIYFIKHTIADIIKKDVEFGSQNCYETVEGRSIKENCFKLEIDRLGNIVKVIKR

SEQ ID NO: 311 - protein, 1430 aa, Bergeyella zoohelcum
MKHILGLDLGTNSIGWAVVKEAQNDNEQSEIVDVGVRVNPLTTDEKTNFEKGKPISTNADRTLKRSARRNLQRYKLRRKELIELLKEHQLISTDTILTENGKGTTFQTLELRAKSAKEKISLEELARVFLTINKKRGYKSSRKAKNEDEGQLIDGMEIAKRLYEENLTTGQLSLQLLKEGKKSLPDYYRSDLQFELDKVWNFQKQFHSDILTDEFYAQLKGKGQRATSALFLAKYQIYTAENKGSREDKKLQAYQWRVDALSKELTREQLAFVITEINNNLNNSSGYLGAISDRSKELYFNNETVGEYLWKQIAANPHTSLKNQVFYRQDYLDEFEQIWKTQSAFYPEILTDELKKELRDVVIFYQRKLKSQKSLVSFCEFENKEIEIKKEDGTSTKKVIGLKVAPKSSPLFQEFKIWQNLNNVLIRKKGSKTKKVAKNQQAVLFEEEKTISELDLEAKQALFNELNLKGNLKADYCLEILGYSPKEWEMNYSVLEGNRTNKALYEAYLKITDLEGYDAKNHLKVKLNKDEVELDDLKVPASEIKDMVQAIFKEAGINTDILHFNAELDGKDFENQASYQLWHLLYSYEGDDSKSGNELLYKLLETKFGFKKEYAQILANVSLSDDYGSLSTKAMRKIHPYIKENKFSTACELAGYRHSKHSLTKEENDNRVLKDSLEVLKKNSLRQPVVEKILNQMINLVNALLKKYRTENPNFKFDEIRIELARELKKNAEERANMTANINKAKTEHEKIIKILKNEFGLPNPTRNDIIRYRLYEELKANGYKDLYTNIKIPQEKLFTKEIDIEHIIPKSRVFDDSFSNKTLSFRKTNLDKGERTAFDYMESKFGADKLEEYVARVEDLYKNNIISKAKYQKLLKKESEIGDGFVERDLRETQYIAKKAKEILLQITPNVLSTSGGITDRLREDWDLINVMKELNLPKYRALGLTQMEDRKYGQQVEVITDWTKRNDHRHHAMDALTVAFTKHNHIQYLNYLNARKNEKHKEHSNIMGIQQLETIKVTDKNGNEKRVFKAPMPNFRQVTKAFLENILISHKAKNKVVTKNKNKVAGSNKVQEVLTPRGQLHKETVYGKYQYYVQKEEKIGAKFDLETIKKVANPLYQSLLKKRLEENGGDPKKAFTGKNSLAKNPIYLDDTQTEQLPEKVKLVWLENSFSIRKDITPENFKDEKLIDKILDEGVKRILKERLQSFGNDAKKAFSDLDKNPIWLNKEKGITIKRVTISGVANAEPLHTKKDHLGKEILDKEGKPIPVDFISTGSNHHVAVYRDEKGNLQEKVVSVFEAVVRANQGLPIIDKTYNQHLGWEFLFTMKQNEMFVFPNESTGFNPNDIDLLDPKNKRIISPNLFRVQKFSKLQYGNSFVREFVFRHHLETTVEDRKELQGITYKQMKNSTFFNDIIKVRINHLGDIVSIGEY

SEQ ID NO: 312 - protein, 1281 aa, Bifidobacterium bifidum
MEDDSQHDIREIYLAIHHMVKYRGNFLVEGTLESSNAFKEDELLKLLGRITRYEMSEGEQNSDIEQDDENKLVAPANGQLADALCATRGSRSMRVDNALEALSAVNDLSREQRAIVKAIFAGLEGNKLDLAKIFVSKEFSSENKKILGIYFNKSDYEEKCVQIVDSGLLDDEEREFLDRMQGQYNAIALKQLLGRSTSVSDSKCASYDAHRANWNLIKLQLRTKENEKDINENYGILVGWKIDSGQRKSVRGESAYENMRKKANVFFKKMIETSDLSETDKNRLIHDIEEDKLFPIQRDSDNGVIPHQLHQNELKQIIKKQGKYYPFLLDAFEKDGKQINKIEGLLAFRVPYFVGPLVVPEDLQKSDNSENHWMVRKKKGEITPWNFDEMVDKDASGRKFIERLVGTDSYLLGEPTLPKNSLLYQEYEVLNELNNVRLSVRTGNHWNDKRRMRLGREEKTLLCQRLFMKGQTVTKRTAENLLRKEYGRTYELSGLSDESKFTSSLSTYGKMCRIFGEKYVNEHRDLMEKIVELQTVFEDKETLLHQLRQLEGISEADCALLVNTHYTGWGRLSRKLLTTKAGECKISDDFAPRKHSIIEIMRAEDRNLMEIITDKQLGFSDWIEQENLGAENGSSLMEVVDDLRVSPKVKRGIIQSIRLIDDISKAVGKRPSRIFLELADDIQPSGRTISRKSRLQDLYRNANLGKEFKGIADELNACSDKDLQDDRLFLYYTQLGKDMYTGEELDLDRLSSAYDIDHIIPQAVTQNDSIDNRVLVARAENARKTDSFTYMPQIADRMRNFWQILLDNGLISRVKFERLTRQNEFSEREKERFVQRSLVETRQIMKNVATLMRQRYGNSAAVIGLNAELTKEMHRYLGFSHKNRDINDYHHAQDALCVGIAGQFAANRGFFADGEVSDGAQNSYNQYLRDYLRGYREKLSAEDRKQGRAFGFIVGSMRSQDEQKRVNPRTGEVVWSEEDKDYLRKVMNYRKMLVTQKVGDDFGALYDETRYAATDPKGIKGIPFDGAKQDTSLYGGFSSAKPAYAVLIESKGKTRLVNVTMQEYSLLGDRPSDDELRKVLAKKKSEYAKANILLRHVPKMQLIRYGGGLMVIKSAGELNNAQQLWLPYEEYCYFDDLSQGKGSLEKDDLKKLLDSILGSVQCLYPWHRFTEEELADLHVAFDKLPEDEKKNVITGIVSALHADAKTANLSIVGMTGSWRRMNNKSGYTFSDEDEFIFQSPSGLFEKRVTVGELKRKAKKEVNSKYRTNEKRLPTLSGASQP

SEQ ID NO: 313 - protein, 1121 aa, Bifidobacterium dentium
MSVGLAAIEVDETGFPIRILNIQSVIHDGGIDPQLGKKKSISRKAISGVARRTRRMRRRKVVRLRQLDATLESLGFPIVEPDSLDTWEIWLTRAKLASSYIQDDETRKEDVSIALRHIARHRGWRNPYSNVESLFVDVAPSEQYEELRRKAEEKLGTSLSGNPTSAEIVECILKRQVGEVQLRTRSRKGVNGNAVEKEGLLPTKLMQSDNAAEIRRIFKVQRIDDETGRKLLRAVFKACSPKGSVERRVGRDALAPGLPRALKASLAFQEYRIANVLTNLVISEDGTKRKLTIAEKQRVFGFLSSNETDDITWIDVAEKLGLERRQIQGVGCLTADGEERISSTPPRNITALHIHSAKPVIREKLVAWWKAASPTVRETMVELLSNTVDIDRVREDMDYSSAVAFIDSLGDEELTALDSVDLLSGRAAYSRQTLKQLTERMLNTDDDLHEARKAVFGVDDNWKPPVDAISTSVGNPAVDRVLKIVNRYLLACQKRWRNPQSVQIEHVRESFSSVAKAKETERVQGERARYRNDLRRELCEQEGLNKIRESDIRRWESVQRQNGTCLYCGSPITFRTCEMDHIVPRKGVGSTNTRVNLAAACAACNKLKSNTAFSVWARTEGAANRKVSQRDAIERVKTFIFNKSVPPREQRAFKQAVISRLRQAESDPAIDNRSIESVAWMADELHRRIEAYFNQDADVSGNTPATQVWVFQGRVTALARKASGIEGRIHFAGEWKKTRLDRRHHAVDAAVIAMMNHSAAQTLVERDSLRLSQWITRKPETWKNYPFSEGQKKTRFKEWLDCMNALLDLLNDALDSDRVPVTRCQRMSLGNSQAHAATIRKMKRVELFSPMDADLIRRASTPALYCALTRLPEYSPEKGLPENRGREIVLNGRHIRSTETVDFFASGAAQLMVRNGSAEIGDSIHHMRIYRYRKTGAKSQEYVYGMIRVFQIDLLHASSENLFAVQLPSQSVSVRYGDKNVVQAIQEGRAEYLGHIVPNDEILISYEGVRMKDSEKIGAYANDFSGTASELAQRRHWVVVGSDVSKLALRPSYLSEEGLENSGSESERLSKQTRKVIEGKGWVVAVNILAKYHPVVIRRNALGEPRFRTNSGMPVSWRWDR

SEQ ID NO: 314 - protein, 354 aa, Bifidobacterium longum
AKQYVNSASIDDAEAETMKTTVSVFQGRVTASARRAAGIEGKIHFIGQQSKTRLDRRHHAVDASVIAMMNTAAAQTLMERESLRESQRLIGLMPGERSWKEYPYEGTSRYESFHLWLDNMDVLLELLNDALDNDRIAVMQSQRYVLGNSIAHDATIHPLEKVPLGSAMSADLIRRASTPALWCALTRLPDYDEKEGLPEDSHREIRVHDTRYSADDEMGFFASQAAQIAVQEGSADIGSAIHHARVYRCWKTNAKGVRKYFYGMIRVFQTDLLRACHDDLFTVPLPPQSISMRYGEPRVVQALQSGNAQYLGSLVVGDEIEMDFSSLDVDGQIGEYLQFFSQFSGGNLAWKHWV

SEQ ID NO: 315 - protein, 1124 aa, Bifidobacterium longum
LTGHSGHTFWPTSSSPPIQLEQEKRPLPQRNTSQNGHTFWPITRERCFMRGKRYRIGIDVGLNSVGLAAVEVSDENSPVRLLNAQSVIHDGGVDPQKNKEAITRKNMSGVARRTRRMRRRKRERLHKLDMLLGKFGYPVIEPESLDKPFEEWHVRAELATRYIEDDELRRESISIALRHMARHRGWRNPYRQVDSLISDNPYSKQYGELKEKAKAYNDDATAAEEESTPAQLVVAMLDAGYAEAPRLRWRTGSKKPDAEGYLPVRLMQEDNANELKQIFRVQRVPADEWKPLFRSVFYAVSPKGSAEQRVGQDPLAPEQARALKASLAFQEYRIANVITNLRIKDASAELRKLTVDEKQSIYDQLVSPSSEDITWSDLCDFLGFKRSQLKGVGSLTEDGEERISSRPPRLTSVQRIYESDNKIRKPLVAWWKSASDNEHEAMIRLLSNTVDIDKVREDVAYASAIEFIDGLDDDALTKLDSVDLPSGRAAYSVETLQKLTRQMLTTDDDLHEARKTLFNVTDSWRPPADPIGEPLGNPSVDRVLKNVNRYLMNCQQRWGNPVSVNIEHVRSSFSSVAFARKDKREYEKNNEKRSIFRSSLSEQLRADEQMEKVRESDLRRLEAIQRQNGQCLYCGRTITFRTCEMDHIVPRKGVGSTNTRTNFAAVCAECNRMKSNTPFAIWARSEDAQTRGVSLAEAKKRVTMFTFNPKSYAPREVKAFKQAVIARLQQTEDDAAIDNRSIESVAWMADELHRRIDWYFNAKQYVNSASIDDAEAETMKTTVSVFQGRVTASARRAAGIEGKIHFIGQQSKTRLDRRHHAVDASVIAMMNTAAAQTLMERESLRESQRLIGLMPGERSWKEYPYEGTSRYESFHLWLDNMDVLLELLNDALDNDRIAVMQSQRYVLGNSIAHDATIHPLEKVPLGSAMSADLIRRASTPALWCALTRLPDYDEKEGLPEDSHREIRVHDTRYSADDEMGFFASQAAQIAVQEGSADIGSAIHHARVYRCWKTNAKGVRKYFYGMIRVFQTDLLRACHDDLFTVPLPPQSISMRYGEPRVVQALQSGNAQYLGSLVVGDEIEMDFPVSMLMVRLASIYNSSRSLVEGTLHGNIGLLMDSLTRRS

SEQ ID NO: 316 - protein, 166 aa, Bifidobacterium longum
MGLAAVEVSDENSPVRLLNAQSVIHDGGVDPQKNKEAITRKNMSGVARRTRRMRRRKRERLHKLDMLLGKFGYPVIEPESLDKPFEEWHVRAELATRYIEDDELRRESISIALRHMARHRGWRNPYRQVDSLISDNPYSKQYGELKEKAKAYNDDATAAEEESTPA

SEQ ID NO: 317 - protein, 1138 aa, Bifidobacterium longum
MNSVGLAAVEVSDENSPVRLLNAQSVIHDGGVDPQKNKEAITRKNMSGVARRTRRMRRRKRERLHKLDMLLGKFGYPVIEPESLDKPFEEWHVRAELATRYIEDDELRRESISIALRHMARHRGWRNPYRQVDSLISDNPYSKQYGELKEKAKAYNDDATAAEEESTPAQLVVAMLDAGYAEAPRLRWRTGSKKPDAEGYLPVRLMQEDNANELKQIFRVQRVPADEWKPLFRSVFYAVSPKGSAEQRVGQDPLAPEQARALKASLAFQEYRIANVITNLRIKDASAELRKLTVDEKQSIYDQLVSPSSEDITWSDLCDFLGFKRSQLKGVGSLTEDGEERISSRPPRLTSVQRIYESDNKIRKPLVAWWKSASDNEHEAMIRLLSNTVDIDKVREDVAYASAIEFIDGLDDDALTKLDSVDLPSGRAAYSVETLQKLTRQMLTTDDDLHEARKTLFNVTDSWRPPADPIGEPLGNPSVDRVLKNVNRYLMNCQQRWGNPVSVNIEHVRSSFSSVAFARKDKREYEKNNEKRSIFRSSLSEQLRADEQMEKVRESDLRRLEAIQRQNGQCLYCGRTITFRTCEMDHIVPRKGVGSTNTRTNFAAVCAECNRMKSNTPFAIWARSEDAQTRGVSLAEAKKRVTMFTFNPKSYAPREVKAFKQAVIARLQQTEDDAAIDNRSIESVAWMADELHRRIDWYFNAKQYVNSASIDDAEAETMKTTVSVFQGRVTASARRAAGIEGKIHFIGQQSKTRLDRRHHAVDASVIAMMNTAAAQTLMERESLRESQRLIGLMPGERSWKEYPYEGTSRYESFHLWLDNMDVLLELLNDALDNDRIAVMQSQRYVLGNSIAHDATIHPLEKVPLGSAMSADLIRRASTPALWCALTRLPDYDEKEGLPEDSHREIRVHDTRYSADDEMGFFASQAAQIAVQEGSADIGSAIHHARVYRCWKTNAKGVRKYFYGMIRVFQTDLLRACHDDLFTVPLPPQSISMRYGEPRVVQALQSGNAQYLGSLVVGDEIEMDFSSLDVDGQIGEYLQFFSQFSGGNLAWKHWVVDGFFNQTQLRIRPRYLAAEGLAKAFSDDVVPDGVQKIVTKQGWLPPVNTASKTAVRIVRRNAFGEPRLSSAHHMPCSWQWRHE

SEQ ID NO: 318 - protein, 182 aa, Bifidobacterium longum
MRGKRYRIGIDVGLNSVGLAAVEVSDENSPVRLLNAQSVIHDGGVDPQKNKEAITRKNMSGVARRTRRMRRRKRERLHKLDMLLGKFGYPVIEPESLDKPFEEWHVRAELATRYIEDDELRRESISIALRHMARHRGWRNPYRQVDSLISDNPYSKQYGELKEKAKAYNDDATAAEEESTPA

SEQ ID NO: 319 - protein, 441 aa, Bifidobacterium longum
MVAMLDAGYAEAPRLRWRTGSKKPDAEGYLPVRLMQEDNANELKQIFRVQRVPADEWKPLFRSVFYAVSPKGSAEQRVGQDPLAPEQARALKASLAFQEYRIANVITNLRIKDASAELRKLTVDEKQSIYDQLVSPSSEDITWSDLCDFLGFKRSQLKGVGSLTEDGEERISSRPPRLTSVQRIYESDNKIRKPLVAWWKSASDNEHEAMIRLLSNTVDIDKVREDVAYASAIEFIDGLDDDALTKLDSVDLPSGRAAYSVETLQKLTRQMLTTDDDLHEARKTLFNVTDSWRPPADPIGEPLGNPSVDRVLKNVNRYLMNCQQRWGNPVSVNIEHVRSSFSSVAFARKDKREYEKNNEKRSIFRSSLSEQLRADEQMEKVRESDLRRLEAIQRQNGQCLYCGRTITFRTCEMDHIVPRKGVGSTNTRTNFAAVCAECNRM

SEQ ID NO: 320 - protein, 967 aa, Bifidobacterium longum
MVAMLDAGYAEAPRLRWRTGSKKPDAEGYLPVRLMQEDNANELKQIFRVQRVPADEWKPLFRSVFYAVSPKGSAEQRVGQDPLAPEQARALKASLAFQEYRIANVITNLRIKDASAELRKLTVDEKQSIYDQLVSPSSEDITWSDLCDFLGFKRSQLKGVGSLTEDGEERISSRPPRLTSVQRIYESDNKIRKPLVAWWKSASDNEHEAMIRLLSNTVDIDKVREDVAYASAIEFIDGLDDDALTKLDSVDLPSGRAAYSVETLQKLTRQMLTTDDDLHEARKTLFNVTDSWRPPADPIGEPLGNPSVDRVLKNVNRYLMNCQQRWGNPVSVNIEHVRSSFSSVAFARKDKREYEKNNEKRSIFRSSLSEQLRADEQMEKVRESDLRRLEAIQRQNGQCLYCGRTITFRTCEMDHIVPRKGVGSTNTRTNFAAVCAECNRMKSNTPFAIWARSEDAQTRGVSLAEAKKRVTMFTFNPKSYAPREVKAFKQAVIARLQQTEDDAAIDNRSIESVAWMADELHRRIDWYFNAKQYVNSASIDDAEAETMKTTVSVFQGRVTASARRAAGIEGKIHFIGQQSKTRLDRRHHAVDASVIAMMNTAAAQTLMERESLRESQRLIGLMPGERSWKEYPYEGTSRYESFHLWLDNMDVLLELLNDALDNDRIAVMQSQRYVLGNSIAHDATIHPLEKVPLGSAMSADLIRRASTPALWCALTRLPDYDEKEGLPEDSHREIRVHDTRYSADDEMGFFASQAAQIAVQEGSADIGSAIHHARVYRCWKTNAKGVRKYFYGMIRVFQTDLLRACHDDLFTVPLPPQSISMRYGEPRVVQALQSGNAQYLGSLVVGDEIEMDFSSLDVDGQIGEYLQFFSQFSGGNLAWKHWVVDGFFNQTQLRIRPRYLAAEGLAKAFSDDVVPDGVQKIVTKQGWLPPVNTASKTAVRIVRRNAFGEPRLSSAHHMPCSWQWRHE

SEQ ID NO: 321 - protein, 1151 aa, Bifidobacterium sp.
MRGKRYRIGIDVGLNSVGLAAVEVSDENSPVRLLNAQSVIHDGGVDPQKNKEAITRKNMSGVARRTRRMRRRKRERLHKLDMLLGKFGYPVIEPESLDKPFEEWHVRAELATRYIEDDELRRESISIALRHMARHRGWRNPYRQVDSLISDNPYSKQYGELKEKAKAYNDDATAAEEESTPAQLVVAMLDAGYAEAPRLRWRTGSKKPDAEGYLPVRLMQEDNANELKQIFRVQRVPADEWKPLFRSVFYAVSPKGSAEQRVGQDPLAPEQARALKASLAFQEYRIANVITNLRIKDASAELRKLTVDEKQSIYDQLVSPSSEDITWSDLCDFLGFKRSQLKGVGSLTEDGEERISSRPPRLTSVQRIYESDNKIRKPLVAWWKSASDNEHEAMIRLLSNTVDIDKVREDVAYASAIEFIDGLDDDALTKLDSVDLPSGRAAYSVETLQKLTRQMLTTDDDLHEARKTLFNVTDSWRPPADPIGEPLGNPSVDRVLKNVNRYLMNCQQRWGNPVSVNIEHVRSSFSSVAFARKDKREYEKNNEKRSIFRSSLSEQLRADEQMEKVRESDLRRLEAIQRQNGQCLYCGRTITFRTCEMDHIVPRKGVGSTNTRTNFAAVCAECNRMKSNTPFAIWARSEDAQTRGVSLAEAKKRVTMFTFNPKSYAPREVKAFKQAVIARLQQTEDDAAIDNRSIESVAWMADELHRRIDWYFNAKQYVNSASIDDAEAETMKTTVSVFQGRVTASARRAAGIEGKIHFIGQQSKTRLDRRHHAVDASVIAMMNTAAAQTLMERESLRESQRLIGLMPGERSWKEYPYEGTSRYESFHLWLDNMDVLLELLNDALDNDRIAVMQSQRYVLGNSIAHDATIHPLEKVPLGSAMSADLIRRASTPALWCALTRLPDYDEKEGLPEDSHREIRVHDTRYSADDEMGFFASQAAQIAVQEGSADIGSAIHHARVYRCWKTNAKGVRKYFYGMIRVFQTDLLRACHDDLFTVPLPPQSISMRYGEPRVVQALQSGNAQYLGSLVVGDEIEMDFSSLDVDGQIGEYLQFFSQFSGGNLAWKHWVVDGFFNQTQLRIRPRYLAAEGLAKAFSDDVVPDGVQKIVTKQGWLPPVNTASKTAVRIVRRNAFGEPRLSSAHHMPCSWQWRHE

SEQ ID NO: 322 - protein, 1092 aa, Brevibacillus laterosporus
MAYTMGIDVGIASCGWAIVDLERQRIIDIGVRTFEKAENPKNGEALAVPRREARSSRRRLRRKKHRIERLKYMFVRNGLAVDIQHLEQTLRSQNEIDVWQLRVDGLDRMLTQKEWLRVLIHLAQRRGFQSNRKTDGSSEDGQVLVNVTENDRLMEEKDYRTVAEMMVKDEKFSDHKRNKNGNYHGVVSRASLLVEIHTLFESQRQHHNFLASKDFELEYINIWSSQRPVATKDQIEKMIGTCTFLPKEKRAPKASWHFQYFMLLQTINHIRITNAQGTRPLNKEEIEQVVNMALTKSKVSYHDIRKVLDLSEEYQFVGLDYGKEDEKKKVESKETIIKLDDYHKLNKIFNEVELAKGETWEAVDYDTVAYALTFFKDDEDIRDYLQNKYKDSKNRLVKNVANKEYTNELIEKVSTLSFRKVGHLSLKALRKIIPFLEQGMTYDKACQAAGFNFQGISKKKRSVVLPVIDQISNPVVNRALTQTRKVINALIKKYGSPETIHIETARELSKRFDERKNITKDYKENRDKNERAKKHLSELGIINPTGLDIVKYKLWCEQQGRCMYSNQPISFERLRESGYTEVDHIIPYSRSMNDSYNNRVLVMTRENREKSNQTPYEYMGNDTQRWDEFEQRVTTNPQIKKEKRQNLLLKGFTNRRELEMLERNLNDTRHITKYLSHFISTNLEFSPSDKKKKVVNTSGRITSHLRSRWGLEKNREQNDLHHAMDAVVIAVTSDSFIQQVTNYYKRKERRELNGDDKFPLPWKFFREEVIARLSPNPKEQIEALPNHFYSEDELADLQPIFVSRMPKRSITGEAHQAQFRRVVGKTKEGKNITAKKTALVDISYDKNGDFNMYGRETDPATYEAIKERYLEFGGNAKKAFSTDLHKPKKDGTKGPLIKSVRIMENKTLVHPVNKGKGVVYNSSIVRTDVFQRKEKYYLLPVYVTDVTKGKLPNKVIAAKKGYDDWIEVDDSFTFLYSLYPNDLIFIRQNPKKKISLKKRIESHSISDSKEVQEILTYYKGVDSSTAAIEFITHDGSYYAKGVGVQNLDCFEKYQVDILGNYSKVKGEKRLELETSDNNHKGKDVNSIKSTSR

SEQ ID NO: 323 - protein, 103 aa, Butyrivibrio fibrisolvens
MISVGQSRKDLEDLGYEFKLSFYKEDIIEYEKNGDILVERFLSRTMPQVRNYIETKPIDRPKYDKRNPVGLSKTSSIRKITMDILGNRFYVDKMSFNNVVGTQ

SEQ ID NO: 324 - protein, 177 aa, Butyrivibrio fibrisolvens
MLIAFSQMGYDAYHELTNKYIDFETGEIIDKEGFNELLNNDLVYKNTMYESKWLKIKGNIEKAAEKNKYWYQVNKKCNRGLCNQTVYGTRESDGDVYKISKIDIRTDDGFKKFKNIVDKGNESVFLMYENDPKTFELIMDIYKNYSDSKNPFVQYEKETGDIIRKYSKKITGQRFLN

SEQ ID NO: 325 - protein, 1442 aa, Caenispirillum salinarum
MPVLSPLSPNAAQGRRRWSLALDIGEGSIGWAVAEVDAEGRVLQLTGTGVTLFPSAWSNENGTYVAHGAADRAVRGQQQRHDSRRRRLAGLARLCAPVLERSPEDLKDLTRTPPKADPRAIFFLRADAARRPLDGPELFRVLHHMAAHRGIRLAELQEVDPPPESDADDAAPAATEDEDGTRRAAADERAFRRLMAEHMHRHGTQPTCGEIMAGRLRETPAGAQPVTRARDGLRVGGGVAVPTRALIEQEFDAIRAIQAPRHPDLPWDSLRRLVLDQAPIAVPPATPCLFLEELRRRGETFQGRTITREAIDRGLTVDPLIQALRIRETVGNLRLHERITEPDGRQRYVPRAMPELGLSHGELTAPERDTLVRALMHDPDGLAAKDGRIPYTRLRKLIGYDNSPVCFAQERDTSGGGITVNPTDPLMARWIDGWVDLPLKARSLYVRDVVARGADSAALARLLAEGAHGVPPVAAAAVPAATAAILESDIMQPGRYSVCPWAAEAILDAWANAPTEGFYDVTRGLFGFAPGEIVLEDLRRARGALLAHLPRTMAAARTPNRAAQQRGPLPAYESVIPSQLITSLRRAHKGRAADWSAADPEERNPFLRTWTGNAATDHILNQVRKTANEVITKYGNRRGWDPLPSRITVELAREAKHGVIRRNEIAKENRENEGRRKKESAALDTFCQDNTVSWQAGGLPKERAALRLRLAQRQEFFCPYCAERPKLRATDLFSPAETEIDHVIERRMGGDGPDNLVLAHKDCNNAKGKKTPHEHAGDLLDSPALAALWQGWRKENADRLKGKGHKARTPREDKDFMDRVGWRFEEDARAKAEENQERRGRRMLHDTARATRLARLYLAAAVMPEDPAEIGAPPVETPPSPEDPTGYTAIYRTISRVQPVNGSVTHMLRQRLLQRDKNRDYQTHHAEDACLLLLAGPAVVQAFNTEAAQHGADAPDDRPVDLMPTSDAYHQQRRARALGRVPLATVDAALADIVMPESDRQDPETGRVHWRLTRAGRGLKRRIDDLTRNCVILSRPRRPSETGTPGALHNATHYGRREITVDGRTDTVVTQRMNARDLVALLDNAKIVPAARLDAAAPGDTILKEICTEIADRHDRVVDPEGTHARRWISARLAALVPAHAEAVARDIAELADLDALADADRTPEQEARRSALRQSPYLGRAISAKKADGRARAREQEILTRALLDPHWGPRGLRHLIMREARAPSLVRIRANKTDAFGRPVPDAAVWVKTDGNAVSQLWRLTSVVTDDGRRIPLPKPIEKRIEISNLEYARLNGLDEGAGVTGNNAPPRPLRQDIDRLTPLWRDHGTAPGGYLGTAVGELEDKARSALRGKAMRQTLTDAGITAEAGWRLDSEGAVCDLEVAKGDTVKKDGKTYKVGVITQGIFGMPVDAAGSAPRTPEDCEKFEEQYGIKPWKAKGIPLA

SEQ ID NO: 326 - protein, 984 aa, Campylobacter coli
MARILAFDIGISSIGWAFSENDELKDCGVRIFTKAENPKTGESLALPRRLARSARKCLARRKARLNHLKHLIANEFKLNYEDYQSFDESLAKAYKGSLISPYELRFRALNELLSKQDFARVILHIAKRRGYDDIKNNGDEEKSEILKAIKQNEEKLVNYQSVGEYLYKEYFQKFKENSKEFINVRNKKESYERCIAQSFLKDELKLIFQKQREFGFSFSKKFEEEVLSVAFYKRALKDFSHLVGNCSFFTDEKRAPKNSPLAFMFVALTRIINLLNNLKNTEGILYTKDDLNALLNEVLKNGTLTYKQTKKLLGLSDDYEFKGEKGTYFIEFKKYKEFIKALGEHNLSQDDLNEIAKDITLIKDEIKLKKALAKYDLNQNQIDSLSKLEFKDHLNISFKALKLITPLMLEGKKYDEACNELNLKVAINEDKKDFLPAFNETYYKDEVTNPVVLRAIKEYRKVLNALLKKYGKVHKINIELAREVGKNHSQRAKIEKEQNENYKAKKDAELECEKLGLKINSKNILKLRLFKEQKEFCAYSGEKIKISDLQDEKMLEIDHIYPYSRSFDDSYMNKVLVFTKQNQEKLNQTPFEAFGNDSAKWQKIEVLAKNLPTKKQKRILDKNYKDKEQKNFKDRNLNDTRYIARLVLNYTKDYLDFLPLSDDENTKLNDTQKGSKVHVEAKSGMLTSALRHTWGFSAKDRNNHLHHAIDAVIIAYANNSIVKAFSDFKKEQESNSAELYAKKISELDYKNKRKFFEPFSGFRQKVLDKIDEIFVSKPERKKPSGALHEETFRKEEEFYQSYGGKEGVLKALELGKIRKVNGKIVKNGDMFRVDIFKHKKTNKFYAVPIYTMDFALKVLPNKAVARSKKGEIKDWILMDENYEFCFSLYKDSLILIQTKDMQEPEFVYYNAFTSSTVSLIVSKHDNKFETLSKNQKILFKNANEKEVIAKSIGIQNLKVFEKYIVSALGEVTKAEFRQREDFKK

SEQ ID NO: 327 - protein, 984 aa, Campylobacter coli
MARILAFDIGISSIGWAFSENDELKDCGVRIFTKAENPKTGESLALPRRLARSARKRLARRKARLNHLKHLIANEFKLNYEDYQSFDESLAKAYKGSLISPYELRFRALNELLSKQDFARVILHIAKRRGYDDIKNNGDEEKGKILKAIKQNEEKLVNYQSVGEYLYKEYFQKFKENSKEFINVRNKKESYERCITQSFLKYELKLIFQKQREFGFSFSKKFEEEVLSVAFYKRALKDFSHLVGNCSFFSDEKRAPKNSPLAFMFVALTRIINLLNNLKNTEGILYTKDDLNALLNEVLKNGTLTYKQTKKLLGLSDDYEFKGEKGTYFIEFKKYKEFIKALGEHNLSQDDLNEIAKDITLIKDEIKLKKALAKYDLNQNQIDSLSKLEFKDHLNISFKALKLITPLMLEGKKYDEACNELNLKVAINEDKKDFLPAFNETYYKDEVTNPVVLRAIKEYRKVLNALLKKYGKVHKINIELAREVGKNYSQRAKIEKEQNENYKAKKDAELECEKLGLKINSKNILKLRLFKEQKEFCAYSGEKIKISDLQDEKMLEIDHIYPYSRSFDDSYMNKVLVFTKQNQEKLNQTPFEAFGNDSAKWQKIEVLAKNLPTKKQKRILDKNYKDKEQKNFKDRNLNDTRYIARLVLNYTKDYLDFLPLSDDENTKLNDTQKGSKVHVEAKSGMLTSALRHTWGFSAKDRNNHLHHAIDAVIIAYANNSIVKAFSDFKKEQESNSAELYAKKISELDYKNKRKFFEPFSGFRQKVLDKIDEIFVSKPERKKPSGALHEETFRKEEEFYQSYGGKEGVLKALELGKIRKVNGKIVKNGDMFRVDIFKHKKTNKFYAVPIYTMDFALKVLPNKAVARSKKGEIKDWILMDENYEFCFSLYKDSLILIQTKDMQEPEFVYYNAFTSSTVSLIVSKHDNKFETLSKNQKILFKNANEKEVIAKSIGIQNLKVFEKYIVSALGEVTKAEFRQREDFKK

SEQ ID NO: 328 - protein, 984 aa, Campylobacter coli
MARILAFDIGISSIGWAFSENDELKDCGVRIFTKAENPKTGESLALPRRLARSARKRLARRKARLNHLKHLIANEFKLNYEDYQSFDESLAKAYKGSLISPYELRFRALNELLSKQDFARVILHIAKRRGYDDIKNNGDEEKSEILKAIKQNEEKLVNYQSVGEYLYKEYFQKFKENSKEFINVRNKKESYERCIAQSFLKDELKLIFQKQREFGFSFSKKFEEEVLSVAFYKRALKDFSHLVGNCSFFTDEKRAPKNSPLAFMFVALTRIINLLNNLKNTEGILYTKDDLNTLLNEVLKNGTLTYKQTKKLLGLSDDYEFKGEKGTYFIEFKKYKEFIKALGEHNLSQDNLNEIAKDITLIKDEIKLKKALAKYDLNQNQIDSLSKLEFKDHLNISFKALKLITPLMLEGKKYDEAYNELNLKVAINEDKKDFLPAFNETYYKDEVTNPVVLRAIKEYRKVLNALLKKYGKVHKINIELAREVGKNHSQRAKIEKEQNENYKAKKDAELECEKLGLKINSKNILKLRLFKEQKEFCAYSGEKIKISDLQDEKMLEIDHIYPYSRSFDDSYMNKVLVFTKQNQEKLNQTPFEAFGNDSAKWQKIEVLAKNLPTKKQKRILDKNYKDKEQKDFKDRNLNDTRYIARLVLNYTKDYLDFLPLSDDENTKLNDTQKGSKVHVEAKSGMLTSALRHTWGFSAKDRNNHLHHAIDAVIIAYANNSIVKAFSDFKKEQESNSAELYAKKISELDYKNKRKFFEPFSGFRQKVLDKIDEIFVSKPERKKPSGALHEETFRKEEEFYQSYGGKEGVLKALELGKIRKVNGKIVKNGDMFRVDIFKHKKTNKFYAVPIYTMDFALKVLPNKAVARSKKGEIKDWILMDENYEFCFSLYKDSLILIQTKDMQEPELVYFNAFTSSTVSLIVSKHDNKFETLSKNQKILFKNANEKEVIAKSIGIQNLKVFEKYIVSALGEVTKAEFRQREDFKK

SEQ ID NO: 329 - protein, 984 aa, Campylobacter coli
MARILAFDIGISSIGWAFSENDELKDCGVRIFTKAENPKTGESLALPRRLARSARKRLARRKARLNHLKHLIANEFKLNYEDYQSFDESLAKAYKGSLISPYELRFRALNELLSKQDFARVILHIAKRRGYDDIKNNGDEEKSEILKAIKQNEEKLVNYQSVGEYLYKEYFQKFKENSKEFINVRNKKESYERCIAQSFLKDELKLIFQKQREFGFSFSKKFEEEVLSVAFYKRALKDFSHLVGNCSFFTDEKRAPKNSPLAFMFVALTRIINLLNNLKNTEGILYTKDDLNALLNEVLKNGTLTYKQTKKLLGLSDDYEFKGEKGTYFIEFKKYKEFIKALGEHNLSQDDLNEIAKDITLIKDEIKLKKALAKYDLNQNQIDSLSKLEFKDHLNISFKALKLITPLMLEGKKYDEACNELNLKVAINEDKKDFLPAFNETYYKDEVTNPVVLRAIKEYRKVLNALLKKYGKVHKINIELAREVGKNYSQRAKIEKEQNENYKAKKDAELECEKLGLKINSKNILKLRLFKEQKEFCAYSGEKIKISDLQDEKMLEIDHIYPYSRSFDDSYMNKVLVFTKQNQEKLNQTPFEAFGNDSAKWQKIEVLAKNLPTKKQKRILDKNYKDKEQKNFKDRNLNDTRYIARLVLNYTKDYLDFLPLSDDENTKLNDTQKGSKVHVEAKSGMLTSALRHTWGFSAKDRNNHLHHAIDAVIIAYANNSIVKAFSDFKKEQESNSAELYAKKISELDYKNKRKFFEPFSGFRQKVLDKIDEIFVSKPERKKPSGALHEETFRKEEEFYQSYGGKEGVLKALELGKIRKVNGKIVKNGDMFRVDIFKHKKTNKFYAVPIYTMDFALKVLPNKAVARSKKGEIKDWILMDENYEFCFSLYKDSLILIQTKDMQEPEFVYYNAFTSSTVSLIVSKHDNKFETLSKNQKILFKNANEKEVIAKSIGIQNLKVFEKYIVSALGEVTKAEFRQREDFKK

SEQ ID NO: 330 - protein, 987 aa, Campylobacter coli
MARILAFDIGISSIGWAFSENDELKDCGVRIFTKAENPKTGESLALPRRLARSARKRLARRKARLNHLKHLIANEFKLNYEDYQSFDESLAKAYKGSLISPYELRFRALNELLSKQDFARVILHIAKRRGYDDIKNNGDEEKSEILKAIKQNEEKLVNYQSVGEYLYKEYFQKFKENSKEFINVRNKKESYERCIAQSFLKDELKLIFQKQREFGFSFSKKFEEEVLSVAFYKRALKDFSHLVGNCSFFTDEKRAPKNSPLAFMFVALTRIINLLNNLKNTEGILYTKDDLNTLLNEVLKNGTLTYKQTKKLLGLSDDYEFKGEKGTYFIEFKKYKEFIKALGEHNLSQDNLNEIAKDITLIKDEIKLKKALAKYDLNQNQIDSLSKLEFKDHLNISFKALKLITPLMLEGKKYDEAYNELNLKVAINEDKKDFLPAFNETYYKDEVTNPVVLRAIKEYRKVLNALLKKYGKVHKINIELAREVGKNHSQRAKIEKEQNENYKAKKDAELECEKLGLKINSKNILKLRLFKEQKEFCAYSGEKIKISDLQDEKMLEIDHIYPYSRSFDDSYMNKVLVFTKQNQEKLNQTPFEAFGNDSAKWQKIEVLAKNLPTKKQKRILDKNYKDKEQKDFKDRNLNDTRYIARLVLNYTKDYLDFLPLSDDENTKLNDTQKGSKVHVEAKSGMLTSALRHTWGFSAKDRNNHLHHAIDAVIIAYANNSIVKAFSDFKKEQESNSAELYAKKISELDYKNKRKFFEPFSGFRQKVLDKIDEIFVSKPERKKPSGALHEETFRKEEEFYQSYGGKEGVLKALELGKIRKVNGKIVKNGDMFRVDIFKHKKTNKFYAVPIYTMDFALKVLPNKAVARSKKGEIKDWILMDENYEFCFSLYKDSLILIQTKDMQEPELVYFNAFTSSTVSLIVSKHDNKFETLSKNQKILFKNANEKEVIAKSIGIQNLKVFEKYIVSALGEVTKAEFRQREDFKNELR

SEQ ID NO: 331 - protein, 984 aa, Campylobacter coli
MARILAFDIGISSIGWAFSENDELKDCGVRIFTKAENPKTGESLALPRRLARSARKRLARRKARLNHLKHLIANEFKLNYEDYQSFDESLAKAYKGSLISPYELRFRALNELLSKQDFARVILHIAKRRGYDDIKNNGDEEKSEILKAIKQNEEKLVNYQSVGEYLYKEYFQKFKENSKEFINVRNKKESYERCIAQSFLKDELKLIFQKQREFGFSFSKKFEEEVLSVAFYKRALKDFSHLVGNCSFFTDEKRAPKNSPLAFMFVALTRIINLLNNLKNTEGILYTKDDLNTLLNEVLKNGTLTYKQTKKLLGLSDDYEFKGEKGTYFIEFKKYKEFIKALGEHNLSQDNLNEIAKDITLIKDEIKLKKALAKYDLNQNQIDSLSKLEFKDHLNISFKALKLITPLMLEGKKYDEAYNELNLKVAINEDKKDFLPAFNETYYKDEVTNPVVLRAIKEYRKVLNALLKKYGKVHKINIELAREVGKNHSQRAKIEKEQNENYKAKKDAELECEKLGLKINSKNILKLRLFKEQKEFCAYSGEKIKISDLQDEKMLEIDHIYPYSRSFDDSYMNKVLVFTKQNQEKLNQTPFEAFGNDSAKWQKIEVLAKNLPTKKQKRILDKNYKDKEQKDFKDRNLNDTRYIARLVLNYTKDYLDFLPLSNDENTKLNDTQKGSKVHVEAKSGMLTSALRHTWGFSAKDRNNHLHHAIDAVIIAYANNSIVKAFSDFKKEQESNSAELYAKKISELDYKNKRKFFEPFSGFRQKVLDKIDEIFVSKPERKKPSGALHEETFRKEEEFYQSYGGKEGVLKALELGKIRKVNGKIVKNGDMFRVDIFKHKKTNKFYAVPIYTMDFALKVLPNKAVARSKKGEIKDWILMDENYEFCFSLYKDSLILIQTKDMQEPELVYFNAFTSSTVSLIVSKHDNKFETLSKNQKILFKNANEKEVIAKSIGIQNLKVFEKYIVSALGEVTKAEFRQREDFKK

SEQ ID NO: 332 - protein, 987 aa, Campylobacter coli
MARILAFDIGISSIGWAFSENDELKDCGVRIFTKAENPKTGESLALPRRLARSARKRLARRKARLNHLKHLIANEFKLNYEDYQSFDESLAKAYKGSLISPYELRFRALNELLSKQDFARVILHIAKRRGYDDIKNSDDKEKGAILKAIKQNEEKLANYQSVGEYLYKEYFQKFKENSKEFTNVRNKKESYERCIAQSFLKDELKLIFKKQREFGFSFSKKFEEEVLSVAFYKRALKDFSHLVGNCSFFTDEKRAPKNSPLAFMFVALTRIINLLNNLKNTEGILYTKDDLNALLNEVLKNGTLTYKQTKKLLGLSDDYEFKGEKGTYFIEFKKYKEFIKALGDHSLSQDDLNEIAKDITLIKDEIKLKKALAKYDLNQNQIDSLSKLEFKDHLNISFKALKLITPLMLEGKKYDEACNELNLKVAINEDKKDFLPAFNETYYKDEVTNPVVLRAIKEYRKVLNALLKKYGKVHKINIELAREVGKNYSQRAKIEKEQNENYKAKKDAELECEKLGLKINSKNILKLRLFKEQKEFCAYSGEKIKISDLQDEKMLEIDHIYPYSRSFDDSYMNKVLVFTKQNQEKLNKTPFEAFGNDSTKWQKIEVLAKNLPEKKQKRILDKNYKDKEQKDFKDRNLNDTRYIARLVLNYTKDYLDFLPLSDDENTKLNDTQKGSKVHVEAKSGMLTSALRHTWGFSTKDRNNHLHHAIDAVIIAYANNSIVKAFSDFKKEQESNSAELYAKKISELDYKNKRKFFEPFSGFRQKVLDKIDEIFVSKPERKKPSGALHEETFRKEEEFYQSYGGKEGVLKALELGKIRKVNGKIVKNGDMFRVDIFKHKKTNKFYAVPIYTMDFALKVLPNKAVARSKKGEIKDWILMDENYEFCFSLYKDSLILIQTKDMQEPEFVYYNAFTSSTVSLIVSKHDNKFETLSKNQKILFKNANEKEVIAKSIGIQNLKVFEKYIVSALGEVTKAEFRQREDFKNELR

SEQ ID NO: 333 - protein, 984 aa, Campylobacter coli
MARILAFDIGISSIGWAFSENDELKDCGVRIFTKAENPKTGESLALPRRLARSARKRLARRKARLNHLKHLIANEFKLNYEDYQSFDESLAKAYKGSLISPYELRFRALNELLSKQDFARVILHIAKRRGYDDIKNSDDKEKGAILKAIKQNEEKLTNYQSVGEYLYKEYFQKFKENSKEFTNVRNKKESYERCIAQSFLKDELKLIFKKQREFGFSFSKKFEEEVLSVAFYKRALKDFSHLVGNCSFFTDEKRAPKNSPLAFMFVALTRIINLLNNLKNTEGILYTKDDLNALLNEVLKNGTLTYKQTKKLLGLSDDYEFKGEKGTYFIEFKKYKEFIKALGDHSLSQDDLNEIAKDITLIKDEIKLKKALAKYDLNQNQIDSLSKLEFKDHLNISFKALKLITPLMLEGKKYDEACNELNLKVAINEDKKDFLPAFNETYYKDEVTNPVVLRAIKEYRKVLNALLKKYGKVHKINIELAREVGKNYSQRAKIEKEQNENYKAKKDAELECEKLGLKINSKNILKLRLFKEQKEFCAYSGEKIKISDLQDEKMLEIDHIYPYSRSFDDSYMNKVLVFTKQNQEKLNQTPFEAFGNDSAKWQKIEVLAKNLPTKKQKRILDKNYKDKEQKDFKDRNLNDTRYIARLVLNYTKDYLDFLPLSDDENTKLNDTQKGSKVHVEAKSGMLTSALRHTWGFSAKDRNNHLHHAIDAVIIAYANNSIVKAFSDFKKEQESNSAELYAKKISELDYKNKRKFFEPFSGFRQKVLDKIDEIFVSKPERKKPSGALHEETFRKEEEFYQSYGGKEGVLKALELGKIRKVNGKIVKNGDMFRVDIFKHKKTNKFYAVPIYTMDFALKVLPNKAVARSKKGEIKDWILMDENYEFCFSLYKDSLILIQTKDMQEPEFVYYNAFTSSTVSLIVSKHDNKFETLSKNQKILFKNANEKEVIAKSIGIQNLKVFEKYIVSALGEVTKAEFRQREDFKK

SEQ ID NO: 334 - protein, 965 aa, Campylobacter coli
MKIIGFNLGIANIGWALRENDEIIDCGVRVFDIPENPKNGNSLALERRENKARMKIVKRKKARMLATKTFLKKELNVDLSKLFLIGSTQSIYELRTKALSSLISKEELSAIILHIAKHRGYDDSALKNENGTIIEALNKNKEAMLKFKSVGEYFYKNFVQNKEVKKIRNTTEDYSNSVPRSLLKQELDLILDKQKELGLIKNADFKAKLFEIIFFKRPLKDFSNKIGNCIFFENEKRAAKNTISACEFVALGKVVNLLKSIEKDIGIVYEKDSINEIMSIILDKTSISYKKIRDILNLPQDINFKGLDYSKNNVENSKLVDLKKLNEFKKALGDGFTNLDKDILDSIATDITLTKDTATLKEKLKNYNVLNAEQIEKLSELVFNDHINLSLKALKQIIPLMYEGKRYDEACELCNFTIAKNQEKNEYLPLFEKTRFAKDISSPVVIRAICEFRKLLNDIIRRYGSVHKIHLELTRDFGISFNDRKKIIKEIEQNEQSRIKALETIKELKLEETSKNIQIVRLFEDQKGICPYSGLKMDLKCLDELVIDYIRPYNRSLDDSYSNKVLTFKKLNDLKQGKTPFEAFGEDEKLWAEINERIKEYNGKKRFKIFDKFFKDKKPFDFTEQTLQDTRWLTKLVASYLNEYLSFLPISEDENTALGYGEKGSKQHVILSSGMITQMLRNFWYLGFKNHKDYKNNAMDAIIVAFTTNSIIFTFNNFKKELDLAKAEFYANKISESDYLLKRKFLPPFSGFKEQALEKVKNIFVSHSLKIKNKGTLHELTPLKIKELKNTYGDLDLAVKLGKIRKYNDKYYANAKGSLVRTDLFADKENKFHAVSIYKADFSTKKLPNKTPATTSNGETKEGIEMNENYNFCMSLYKNTPISVKIKGMKEPIICYYHGFNTSGSKITYKKHDNNYHNLSEDEMVVFRKNDKESIVVGKILEIKKYSISPSGELSLIENEERKWF

SEQ ID NO: 335 - protein, 965 aa, Campylobacter coli
MKIIGFNLGIANIGWALRENDEIIDCGVRVFDIPENPKNGNSLALERRENKARMKIVKRKKARMLATKTFLKKELNVDLSKLFLIGSTQSIYELRTKALSSLISKEELSAIILHIAKHRGYDDSALKNENGTIIEALNKNKEAMLKFKSVGEYFYKNFVQNKEVKKIRNTTEDYSNSVPRSLLKQELDLILDKQKELGLIKNADFKAKLFEIIFFKRPLKDFSNKIGNCIFFENEKRAAKNTISACEFVALGKVVNLLKSIEKDIGIVYEKDSINEIMSIILDKTSISYKKIRDILNLPQDINFKGLDYSKNNAENSKLVDLKKLNEFKKALGDGFANLDKDILDSIATDITLTKDTATLKEKLKNYNVLNAEQIEKLSELVFNDHINLSLKALKQIIPLMYEGKRYDEACELCNFTIAKNQEKNEYLPLFEKTRFAKDISSPVVIRAICEFRKLLNDIIRRYGSVHKIHLELTRDFGISFNDRKKIIKEIEQNEQSRIKALETIKELKLEETSKNIQIVRLFEDQKGICPYSGLKMDLKCLDELVIDYIRPYNRSLDDSYSNKVLTFKKLNDLKQGKTPFEAFGEDEKLWAEINERIKEYNGKKRFKIFDKFFKDKKPFDFTEQTLQDTRWLTKLVASYLNEYLSFLPISEDENTALGYGEKGSKQHVVLSSGMITQMLRNFWYLGFKNHKNYKNNAMDAIIVAFTTNSIIFAFNNFKKELDLAKAEFYANKISESDYLLKRKFLPPFSGFKEQALEKVKNIFVSHSLKIKNKGTLHELTPLKIKELKNTYGDLDLAVKLGKIRKYNDKYYANTKGSLVRTDLFVDKENKFHAVSIYKADFSTKKLPNKTPATTSNGETKEGIEMNENYNFCMSLYKNTPVSVKIKGMKEPIICYYHGFNTSGSKITYKKHDNNYHNLSEDEMVVFRKNDKESIVVGKILEIKKYSISPSGELSLIENEKRKWF

SEQ ID NO: 336 - protein, 965 aa, Campylobacter coli
MKIIGFNLGIANIGWALRENDEIIDCGVRVFDIPENPKNGNSLALERRENKARMKIVKRKKARMLATKTFLKKELNVDLSKLFLIGSTQSIYELRTKALSSLISKEELSAIILHIAKHRGYDDSALKNENGTIIEALNKNKEAMLKFKSVGEYFYKNFVQNKEVKKIRNTTEDYSNSVPRSLLKQELDLILDKQKELGLIKNADFKEKLFEIIFFKRPLKDFSNKIGNCIFFENEKRAAKNTISACEFVALGKVVNLLKSIEKDIGIVYEKDSINEIMSIILDKTSISYKKIRDILNLPQDINFKGLDYSKNNAENSKLVDLKKLNEFKKALGDGFANLDKDILDSIATDITLTKDTATLKEKLKNYNVLNAEQIEKLSELVFNDHINLSLKALKQIIPLMYEGKRYDEACELCNFTIAKNQEKNEYLPLFEKTRFAKDISSPVVIRAICEFRKLLNDIIRRYGSVHKIHLELTRDFGISFNDRKKIIKEIEQNEQSRIKALETIKELKLEETSKNIQIVRLFEDQKGICPYSGLKMDLKCLDELVIDYIRPYNRSLDDSYSNKILTFKKLNDLKQGKTPFEAFGEDEKLWAEINERIKEYNGKKRFKIFDKFFKDKKPFDFTEQTLQDTRWLTKLVASYLNEYLLFLPINEDENTALGYGEKGSKQHVVLSSGMITQMLRNFWYLGFKNHKDYKNNAMDAIIVAFTTNSIIFAFNNFKKELDLAKAEFYANKISESDYLLKRKFLPPFSGFKEQALEKVKNIFVSHSLKIKNKGTLHELTPLKIKELKNTYGDLDLAVKLGKIRKYNDKYYANAKGSLVRTDLFADKENKFHAVSIYKADFSTKKLPNKTPATTSNGETKEGIEMNENYNFCMSLYKNTPISVKIKGMKEPIICYYHGFNTSGSKITYKKHDNNYHNLSEDEMVVFRKNDKESIVVGKILEIKKYSISPSGELSLIENEERKWF

SEQ ID NO: 337 - protein, 933 aa, Campylobacter coli
MKIIGFNLGIANIGWALRENDEIIDCGVRVFDIPENPKNGNSLALERRENKARMKIVKRKKARMLATKTFLKKELNVDLSKLFLIGSTQSIYELRTKALSSLISKEELSVIILHIAKHRGYDDSALKNENGTIIEALNKNKETMLKFKSVGEYFYKNFVQNKEVKKIRNTTEDYSNSVPRSLLKQELDLILDRQKELGLIKNADFKAKLFEIIFFKRPLKDFSNKIGNCIFFENEKRAAKNTISACEFVALGKVVNLLKSIEKDIGIVYEKDSINEIMSIILDKTSISYKKIRDILNLPQDINFKGLDYSKNNVENSKLVDLKKLNEFKKALGDGFTNLDKDILDSIATDITLTKDTATLKEKLKNYNVLNAEQIEKLSELVFNDHINLSLKALKQIIPLMYEGKRYDEACELCNFTIAKNQEKNEYLPLFEKTRFAKDISSPVVIRAICEFRKLLNDIIRRYGSVHKIHLELTRDFGISFNDRKKIIKEIEQNEQSRIKALETIKELKLEETSKNIQIVRLFEDQKGICPYSGLKMDLKCLDELVIDYIRPYNRSLDDSYSNKVLTFKKLNDLKQGKTPFEAFGEDEKLWAEINERIKEYNGKKRFKIFDKFFKDKKPFDFTEQTLQDTRWLTKLVASYLNEHLSFLPISEDENTALGYGEKGSKQHVILSSGMITQMLRNFWYLGFKNHKDYKNNAMDAIIVAFTTNSIIFTFNNFKKELDLAKAEFYANKISESDYLLKRKFLPPFSGFKEQALEKVKNIFVSHSLKIKNKGTLHELTPLKIKELKNTYGDLDLAVKLGKIRKYNDKYYANANGSLVRSDLFIDKKNKFHAVPIYKADFSTKKLPNKTPATTSNGETKEGIEMNENYNFCMSLYKNTPISVKIKGMKESIICYYHGFNTSGSKITYKKHDNNYHNLSEDEMVVFRKNDKE

SEQ ID NO: 338 - protein, 666 aa, Campylobacter jejuni
KGEKGTYFIEFKKYKEFIKALDEHSLSQDDLNEIAKDITLIKDEIKLKKALAKYDLKENQIDSLSKLEFKDHLNISFKALKLITPLMLEGKKYDEACNELNLKVAINEDKKDFLPAFNETYYKDEVTNPVVLRAIKEYRKILNALLKKYGKVHKINIELAREVGKNHSQRAKIEKEQNENYKAKKDAELECEKLGLKINSKNILKLRLFKEQKEFCVYSGEKIKLSDLQDEKMLEIDHIYPYSRSFDDSYMNKVLVFAKQNQEKLNKTPFEAFGNDSTKWQKIEVLTKNLPTKKQKRILDKNYKDKEQKDFKDRNLNDTRYIARLVLNYTKDYLDFLPLSDDENTKLNDTQKGSKVHVEAKSGMLTSALRHTWGFSTKDRNNHLHHAIDAAIIAYANNSIVKAFSDFKKEQESNSAELYAKKISELDYKNKRKFFEPFSGFRQKVLDKIDEIFVSKPERKKPSGALHEETFRKEEEFYQSYGGKEGVLKALELGKIRKVNGKIVKNGDMFRVDIFKHKKTNKFYAVPIYTMDFALKVLPNKAVARSKKGEIKDWILMDEDYEFCFSLYKDSLILIQTKDMQEPELVYFNAFTSSTVSLIVSKHDNKFETLSKNQKILFKNANEKEVIAKSIGIQNLKVFEKYIVSALGEVTKAEFRQREDFKNELR

SEQ ID NO: 339 - protein, 190 aa, Campylobacter jejuni
MAFDIGISSIGWAFSENDELKDCGVRIFTKVENPKTGESLALPRRLARSARKRLARRKARLNHLKHLIANEFKLNYEDYQSFDESLAKAYKGSLISPYELRFRALNELLSKQDFARVILHIAKRRGYDDIKNSDDKEKGAILKAIKQNEEKLANYQSVGEYLYKEYFQKFKENSKEFTNVRNKKKVMNAA

SEQ ID NO: 340 - protein, 985 aa, Campylobacter jejuni
MAKILAFDIGISSIGWAFVENDELKDCGVRIFTKAENPKTGESLALPRRLARSARKRLARRKARLNHLKHLIANEFKLNYEDYQSFDESLAKAYKGTLISPYELRFKALNELLSKQDLARVILHIAKRRGYDNIKNSDDKEKGAILKAVKENEEKLANYKSVGEYLYKEYFQKFKENSKEFINVRNKKESYERCIAQSFLKDELKLIFQKQREFGFNFSKKFEEEVLSVAFYKRALKDFSHLVGNCSFFVDEKRAPKNSPLAFEFVALTRIVNLLNNLNKNNSYIKDDLNALLSEVLKNGTLTYKQTKKILGLSDDYEFKGQKGNYFIEFKKYKEFIKALCEHNLNQDDLNEIAKDITLVKDETKLKKALAKYDLNQNQIENLSKIEFKDHLNISFKALKLIVPLMREGKKYDEVCNELNLKTAINEDKKEFLPAFNETYYKDEVNNPVVLRAIKEYRKVLNSLLKKYGKVHKINIELAREVGKNHRERSKIEKEQNENFKAKKDAELECEKLGLKINSKNILKLRLFKEQKEFCVYSGEKIKISDLQDEKMLEIDHIYPYSRSFDDSYMNKVLVFTKQNQEKLNKTPFEAFGKDDVKWQKIETLAKNLPAKKQKRILDKNYKDKEQKDFKDRNLNDTRYIARLVLNYTKDYLEFLPLSDDENIKLNDTQKGSKVHVEAKSGMLTSVLRHTWGFSTKDRNNHLHHAIDAVIIAYANASVVKAFSDFKKEQENYTAELYAKKINELDFKNKRKFFEPFSNFRQKVLEKIDEIFVSKPERKKPSGALHEETFYKEEEFYKEYGGKEGVLKALELGKIRKVNGKIVSNANMFRVDIFKYKKTNKFYAVPIYTMDFALGILPNKAVVGGKDKQGIIKDWLLMDENYEFCFSLYKDSLILLQTKDMQEPELVYFKSFKSSTAGLVVSKHDNKFENLNENQKKLFKSANEKKVVAEGIGIQNLKVFEKYIVSALGEITKAEIKERENFKKK

SEQ ID NO: 341 - protein, 987 aa, Campylobacter jejuni
MARILAFDIGISSIGWAFSENDELKDCGVRIFTKAENPKTGESLALPRCLARSARKRLARRKARLNHLKHLIANEFKLNYEDYQSFDESLAKAYKGSLISPYELRFRALNELLSKQDFARVILHIAKRRGYDDIKNNGDEEKGEILKAIKQNEEKLVSYQSVGEYLYKEYFQKFKENSKEFINVRNKKESYERCIAQSFLKDELKLIFQKQRKFGFSFSKKFEEEVLSVAFYKRALKDFSHLVGNCSFFTDEKRAPKNSPLAFMFVALTRIINLLNNLKNTEGILYTKDDLNTLLNEVLKNGTLTYKQTKKLLGLSNDYEFKGEKGTYFIEFQKYKEFVKALGEHNLSQDDLNEIAKDITLIKDEIKLKKALAKYDLNQNQIDSLSKLEFKDHLNISFKALKLITPLMLEGKKYDEACNELNLKVAINEDKKDFLPAFNETYYKDEVTNPVVLRAIKEYRKVLNALLKKYGKVHKINIELAREVGKNHSQRAKIEKEQNENYKAKKDAELECEKLGLKINSKNILKLRLFKEQKEFCVYSGEKIKISDLQDEKMLEIDHIYPYSRSFDDSYMNKVLVFTKQNQEKLNKTPFETFGNDRVKWQKIEVLAKNLPTKKQKRILDKNYKDKEQKDFKDRNLNDTRYIARLVLNYTKDYLDFLPLSDDENTKLNDTQKGSKVHVEAKSGMLTSTLRHTWGFSTKDRNNHLHHAIDAAIIAYANNSIVKAFSDFKKEQESNTAELYAKKISELDYKNKRKFFEPFSGFRQKLLDKIDEIFVSKPERKKPSGALHEETFRKEEEFYQSYGGKEGVLKALELGKIRKVNGKIVSNGDMFRVDIFKHKKTNKFYAVPIYTMDFALKVLPNKAVVQGKDKKSGLIKDWILMDENYEFCFSLYKDSLILIQTKDMQEPELVYYERLDSSNASLTVSKHDNKFETLSKNQKILFKNANEKEVIAKSIGIQNLKVFEKYIVSALGEVTKAEFRQREDFKK

SEQ ID NO: 342 - protein, 987 aa, Campylobacter jejuni
MARILAFDIGISSIGWAFSENDELKDCGVRIFTKAENPKTGESLALPRRLARSARKRLARRKARLNHLKHLIANEFKLNYEDYQSFDEGLAKAYKGSLISPYELRFRALNELLSKQDFARVILHIAKRRGYDDIKNNGDEEKSEILKAIKQNEEKLVNYQSVGEYLYKEYFQKFKENSKEFINVRNKKESYERCIAQSFLKDELKLIFQKQREFGFSFSKKFEEEVLSVAFYKRALKDFSHLVGNCSFFTDEKRAPKNSPLAFMFVALTRIINLLNNLKNTEGILYTKDDLNTLLNEVLKNGTLTYKQTKKLLGLSDDYEFKGEKGTYFIEFKKYKEFIKALGEHNLSQDNLNEIAKDITLIKDEIKLKKALAKYDLNQNQIDSLSKLEFKDHLNISFKALKLITPLMLEGKKYDEAYNELNLKVAINEDKKDFLPAFNETYYKDEVTNPVVLRAIKEYRKVLNALLKKYGKVHKINIELAREVGKNHSQRAKIEKEQNENYKAKKDAELECEKLGLKINSKNILKLRLFKEQKEFCAYSGEKIKISDLQDEKMLEIDHIYPYSRSFDDSYMNKVLVFTKQNQEKLNQTPFEAFGNDSAKWQKIEVLAKNLPTKKQKRILDKNYKDKEQKDFKDRNLNDTRYIARLVLNYTKDYLDFLPLSDDENTKLNDTQKGSKVHVEAKSGMLTSALRHTWGFSAKDRNNHLHHAIDAVIIAYANNSIVKAFSDFKKEQESNSAELYAKKISELDYKNKRKFFEPFSGFRQKVLDKIDEIFVSKPERKKPSGALHEETFRKEEEFYQSYGGKEGVLKALELGKIRKVNGKIVKNGDMFRVDIFKHKKTNKFYAVPIYTMDFALKVLPNKAVVQGKDKKSGLIKDWILMDENYEFCFSLYKDSLILIQTKDMQEPELVYFNAFTSSTVSLIVSKHDNKFETLSKNQKILFKNANEKEVIAKSIGIQNLKVFEKYIVSALGEVTKAEFRQREDFKK

SEQ ID NO: 343 - protein, 961 aa, Campylobacter jejuni
MARILAFDIGISSIGWAFSENDELKDCGVRIFTKAENPKTGESLALPRRLARSARKRLARRKARLNHLKHLIANEFKLNYEDYQSFDESLAKAYKGSLISPYELRFRALNELLSKQDFARVILHIAKRRGYDDIKNNGDEEKGKILKAIKQNEEKLVNYQSVGEYLYKEYFQKFKENSKEFINVRNKKESYERCITQSFLKYELKLIFQKQREFGFSFSKKFEEEVLSVAFYKRALKDFSHLVGNCSFFSDEKRAPKNSPLAFMFVALTRIINLLNNLKNTEGILYTKDDLNALLNEVLKNGTLTYKQTKKLLGLSDDYEFKGEKGTYFIEFKKYKEFIKALGEHNLSQDDLNEIAKDITLIKDEIKLKKALAKYDLNQNQIDSLSKLEFKDHLNIGFKALKLITPLMLEGKKYDEACNELNLKVAINEDKKDFLPAFNETYYKDEVTNPVVLRAIKEYRKVLNALLKKYGKVHKINIELAREVGKNHSQRAKIEKEQNENYKAKKDAELECEKLGLKINSKNILKLRLFKEQKEFCAYSGEKIKLSDLQDEKMLEIDHIYPYSRSFDDSYMNKVLVFTKQNQEKLNKTPFEAFGNDNVKWQKIEVLAKNLPEKKQKRILDKNYKDKEQKDFKDRNLNDTRYIARLVLNYTKDYLDFLPLSDDENTKLKGSKVHVEAKSGMLTSALRHTWGFSTKDRNNHLHHAIDAAIIAYANNSIVKDFSDFKKEQESNSAELYAKKISELDYKNKRKFFEPFSGFRQKVLDKIDEIFVSKPERKKPSGALHEETFRKEEEFYQSYGGKEGVLKALELGKIRKVNGKIVKNGDMFRVDIFKHKKTNKFYAVPIYTMDFALKVLPNKAVARSKKGEIKDWILMDENYEFCFSLYKDSLILIQTKDMQEPELVYFNAFTSSTVSLIVSKHDNKFETLSKNLKVFEKYIVSALGEVTKAEFRQREDFKNELR

SEQ ID NO: 344 - protein, 984 aa, Campylobacter jejuni
MARILAFDIGISSIGWAFSENDELKDCGVRIFTKAENPKTGESLALPRRLARSARKRLARRKARLNHLKHLIANEFKLNYEDYQSFDESLAKAYKGSLISPYELRFRALNELLSKQDFARVILHIAKRRGYDDIKNNGDEEKGKILKAIKQNEEKLVNYQSVGEYLYKEYFQKFKENSKEFINVRNKKESYERCITQSFLKYELKLIFQKQREFGFSFSKKFEEEVLSVAFYKRALKDFSHLVGNCSFFTDEKRAPKNSPLAFMFVALTRIINILNNLKNTEGILYTKDDLNALLNEVLKNGTLTYKQTKKLLGLSDDYEFKGEKGTYFIEFKKYKEFIKALGEHNLSQDDLNEIAKDITLIKDEIKLKKALAKYDLNQNQIDSLSKLEFKDHLNISFKALKLITPLMLEGKKYDEACNELNLKVAINEDKKDFLPAFNETYYKDEVTNPVVLRAIKEYRKILNALLKKYGKVHKINIELAREVGKNHSQRAKIEKEQNENYKAKKDAEIECEKLGLKINSKNILKLRLFKEQKEFCAYSGEKIKISDLQDEKMLEIDHIYPYSRSFDDSYMNKVLVFTKQNQEKLNQTPFEAFGNDSAKWQKIEVLAKNLPTKKQKRILDKNYKDKEQKDFKDRNLNDTRYIARLVLNYTKDYLDFLPLSDDENTKLNDTQKGSKVHVEAKSGMLTSALRHTWGFSAKDRNNHLHHAIDAVIIAYANNSIVKAFSDFKKEQESNSAELYAKKISELDYKNKRKFFEPFSGFRQKVLDKIDEIFVSKPERKKPSGALHEETFRKEEEFYQSYGGKEGVLKALELGKIRKVNGKIVKNGDMFRVDIFKHKKTNKFYAVPIYTMDFALKVLPNKAVARSKKGEIKDWILMDENYEFCFSLYKDSLILIQTKDMQEPEFVYYNAFTSSTVSLIVSKHDNKFETLSKNQKILFKNANEKEVIAKSIGIQNLKVFEKYIVSALGEVTKAEFRQREDFKK

SEQ ID NO: 345 - protein, 987 aa, Campylobacter jejuni
MARILAFDIGISSIGWAFSENDELKDCGVRIFTKAENPKTGESLALPRRLARSARKRLARRKARLNHLKHLIANEFKLNYEDYQSFDESLAKAYKGSLISPYELRFRALNELLSKQDFARVILHIAKRRGYDDIKNNGDEEKGKILKAIKQNEEKLVSYQSVGEYLYKEYFQKFKENSKEFINVRNKKESYERCIAQSFLKDELKLIFQKQREFGFSFSKKFEEEVLSVAFYKRALKDFSHLVGNCSFLLMKKERQKNSPLAFMFVALTRIINLLNNLKNTEGILYTKDDLNTLLNEALKNGTLTYKQTKKLLGLSNDYEFKGEKGTYFIEFQKYKEFVKALGEHNLSQDDLNEIAKDITLIKDEIKLKKALAKYDLNQNQIDSLSKLEFKDHLNISFKALKLITPLMLEGKKYDEACNELNLKVAINEDKKDFLPAFNETYYKDEVTNPVVLRAIKEYRKVLNALLKKYGKVHKINIELAREVGKNHSQRAKIEKEQNENYKAKKDAELECEKLGLKINSKNILKLRLFKEQKEFCVYSGEKIKISDLQDEKMLEIDHIYPYSRSFDDSYMNKVLVFTKQNQEKLNKTPFETFGNDRVKWQKIEVLAKNLPTKKQKRILDKNYKDKEQKDFKDRNLNDTRYIARLVLNYTKDYLDFLPLSDDENTKLNDTQKGSKVHVEAKSGMLTSTLRHTWGFSTKDRNNHLHHAIDAAIIAYANNSIVKAFSDFKKEQESNTAELYAKKISELDYKNKRKFFEPFSGFRQKLLDKIDEIFVSKPERKKPSGALHEETFRKEEEFYQSYGGKEGVLKALELGKIRKVNGKMVKNGDMFRVDIFKHKKTNKFYAVPIYTMDFALKVLPNKAVVQGKDKKSGLIKDWILMDENYEFCFSLYKDSLILIQTKDMQEPELVYYERLDSSNASLTVSKHDNKFETLSKNQKILFKNANEKEVIAKSIGIQNLKVFEKYIVSALGEVTKAEFRQREDFKK

SEQ ID NO: 346 - protein, 987 aa, Campylobacter jejuni
MARILAFDIGISSIGWAFSENDELKDCGVRIFTKAENPKTGESLALPRRLARSARKRLARRKARLNHLKHLIANEFKLNYEDYQSFDESLAKAYKGSLISPYELRFRALNELLSKQDFARVILHIAKRRGYDDIKNNGDEEKSEILKAIKQNEEKLVNYQSVGEYLYKEYFQKFKENSKEFINVRNKKESYERCIAQSFLKDELKLIFQKQREFGFSFSKKFEEEVLSVAFYKRALKDFSHLVGNCSFFTDEKRAPKNSPLAFMFVALTRIINLLNNLKNTEGILYTKDDLNTLLNEVLKNGTLTYKQTKKLLGLSDDYEFKGEKGTYFIEFKKYKEFIKALGEHNLSQDNLNEIAKDITLIKDEIKLKKALAKYDLNQNQIDSLSKLEFKDHLNISFKALKLITPLMLEGKKYDEAYNELNLKVAINEDKKDFLPAFNETYYKDEVTNPVVLRAIKEYRKVLNALLKKYGKVHKINIELAREVGKNHSQRAKIEKEQNENYKAKKDAELECEKLGLKINSKNILKLRLFKEQKEFCAYSGEKIKISDLQDEKMLEIDHIYPYSRSFDDSYMNKVLVFTKQNQEKLNQTPFEAFGNDSAKWQKIEVLAKNLPTKKQKRILDKNYKDKEQKDFKDRNLNDTRYIARLVLNYTKDYLDFLPLSDDENTKLNDTQKGSKVHVEAKSGMLTSALRHTWGFSAKDRNNHLHHAIDAVIIAYANNSIVKAFSDFKKEQESNSAELYAKKISELDYKNKRKFFEPFSGFRQKVLDKIDEIFVSKPERKKPSGALHEETFRKEEEFYQSYGGKEGVLKALELGKIRKVNGKIVKNGDMFRVDIFKHKKTNKFYPVPIYTMDFALKVLPNKAVVQGKDKKSGLIKDWILMDENYEFCFSLYKDSLILIQTKDMQEPELVYFNAFTSSTVSLIVSKHDNKFETLSKNQKILFKNANEKEVIAKSIGIQNLKVFEKYIVSALGEVTKAEFRQREDFKK

SEQ ID NO: 347 - protein, 987 aa, Campylobacter jejuni
MARILAFDIGISSIGWAFSENDELKDCGVRIFTKAENPKTGESLALPRRLARSARKRLARRKARLNHLKHLIANEFKLNYEDYQSFDESLAKAYKGSLISPYELRFRALNELLSKQDFARVILHIAKRRGYDDIKNNGDEEKSEILKAIKQNEEKLVNYQSVGEYLYKEYFQKFKENSKEFINVRNKKESYERCIAQSFLKDELKLIFQKQREFGFSFSKKFEEEVLSVAFYKRALKDFSHLVGNCSFFTDEKRAPKNSPLAFMFVALTRIINLLNNLKNTEGILYTKDDLNTLLNEVLKNGTLTYKQTKKLLGLSDDYEFKGEKGTYFIEFKKYKEFIKALGEHNLSQDNLNEIAKDITLIKDEIKLKKALAKYDLNQNQIDSLSKLEFKDHLNISFKALKLITPLMLEGKKYDEAYNELNLKVAINEDKKDFLPAFNETYYKDEVTNPVVLRAIKEYRKVLNALLKKYGKVHKINIELAREVGKNHSQRAKIEKEQNENYKAKKDAELECEKLGLKINSKNILKLRLFKEQKEFCAYSGEKIKISDLQDEKMLEIDHIYPYSRSFDDSYMNKVLVFTKQNQEKLNQTPFEAFGNDSAKWQKIEVLAKNLPTKKQKRILDKNYKDKEQKDFKDRNLNDTRYIARLVLNYTKDYLDFLPLSDDENTKLNDTQKGSKVHVEAKSGMLTSALRHTWGFSAKDRNNHLHHAIDAVIIAYANNSIVKAFSDFKKEQESNSAELYAKKISELDYKNKRKFFEPFSGFRQKVLDKIDEIFVSKPERKKPSGALHEETFRKEEEFHQSYGGKEGVLKALELGKIRKVNGKIVKNGDMFRVDIFKHKKTNKFYAVPIYTMDFALKVLPNKAVVQGKDKKSGLIKDWILMDENYEFCFSLYKDSLILIQTKDMQEPELVYFNAFTSSTVSLIVSKHDNKFETLSKNQKILFKNANEKEVIAKSIGIQNLKVFEKYIVSALGEVTKAEFRQREDFKK

SEQ ID NO: 348 - protein, 987 aa, Campylobacter jejuni
MARILAFDIGISSIGWAFSENDELKDCGVRIFTKAENPKTGESLALPRRLARSARKRLARRKARLNHLKHLIANEFKLNYEDYQSFDESLAKAYKGSLISPYELRFRALNELLSKQDFARVILHIAKRRGYDDIKNNGDEEKSEILKAIKQNEEKLVNYQSVGEYLYKEYFQKFKENSKEFINVRNKKESYERCIAQSFLKDELKLIFQKQREFGFSFSKKFEEEVLSVAFYKRALKDFSHLVGNCSFFTDEKRAPKNSPLAFMFVALTRIINLLNNLKNTEGILYTKDDLNTLLNEVLKNGTLTYKQTKKLLGLSDDYEFKGEKGTYFIEFKKYKEFIKALGEHNLSQDNLNEIAKDITLIKDEIKLKKALAKYDLNQNQIDSLSKLEFKDHLNISFKALKLITPLMLEGKKYDEAYNELNLKVAINEDKKDFLPAFNETYYKDEVTNPVVLRAIKEYRKVLNALLKKYGKVHKINIELAREVGKNHSQRAKIEKEQNENYKAKKDAELECEKLGLKINSKNILKLRLFKEQKEFCAYSGEKIKISDLQDEKMLEIDHIYPYSRSFDDSYMNKVLVFTKQNQEKLNQTPFEAFGNDSAKWQKIEVLAKNLPTKKQKRILDKNYKDKEQKDFKDRNLNDTRYIARLVLNYTKDYLDFLPLSDDENTKLNDTQKGSKVHVEAKSGMLTSALRHTWGFSAKDRNNHLHHAIDAVIIAYANNSIVKAFSDFKKEQESNSAELYAKKISELDYKNKRKFFEPFSGFRQKVLDKIDEIFVSKPERKKPSGALHEETFRKEEEFYQSYGGKEGVLKALELGKIRKVNGKIVKNGDMFRVDIFKHKKTNKFYAVPIYTMDFALKVLPNKAVVQGKDKKSGLIKDWILMDENYEFCFSLYKDSLILIQTKDMQEPELVYFNAFTSSTVSLIVSKHDNKFETLSKNQKILFKNANEKEVIAKSIGIQNLKVFEKYIVSALGEVTKAEFRQREDFKK

SEQ ID NO: 349 - protein, 861 aa, Campylobacter jejuni
MARILAFDIGISSIGWAFSENDELKDCGVRIFTKAENPKTGESLALPRRLARSARKRLARRKARLNHLKHLIANEFKLNYEDYQSFDESLAKAYKGSLISPYELRFRALNELLSKQDFARVILHIAKRRGYDDIKNNGDEEKSEILKAIKQNEEKLVNYQSVGEYLYKEYFQKFKENSKEFINVRNKKESYERCITQSFLKDELKLIFQKQREFGFSFSKKFEEEVLSVAFYKRALKDFSHLVGNCSFFTDEKRAPKNSPLAFMFVALTRIINILNNLKNTEGILYTKDDLNALLNEVLKNGTLTYKQTKKLLGLSDDYEFKGEKGTYFIEFKKYKEFIKALGEHNLSQDDLNEIAKDITLIKDEIKLKKALAKYDLNQNQIDSLSKLEFKDHLNISFKALKLITPLMLEGKKYDEACNELNLKVAINEDKKDFLPAFNETYYKDEVTNPVVLRAIKEYRKILNALLKKYGKVHKINIELAREVGKNHSQRAKIEKEQNENYKAKKDAEIECEKLGLKINSKNILKLRLFKEQKEFCAYSGEKIKLSDLQDEKMLEIDHIYPYSRSFDDSYMNKVLVFTKQNQEKLNKTPFEAFGNDSTKWQKIEVLAKNLPEKKQKRILDKNYKDKEQKDFKDRNLNDTRYIARLVLNYTKDYLDFLPLSDDENTKLNDTQKGSKVHVEAKSGMLTSALRHTWGFSAKDRNNHLHHAIDAAIIAYANNSIVKAFSDFKKEQESNSVELYAKKISELDYKNKRKFFEPFSGFRQKVLDKIDEIFVSKPERKKPSGALHEETFRKEEEFYQSYGGKEGVLKALELGKIRKVNGKIVKNGDMFRVDIFKHKKTNKFLCCANLYYGFCFKSITK

SEQ ID NO: 350 - protein, 462 aa, Campylobacter jejuni
MARILAFDIGISSIGWAFSENDELKDCGVRIFTKAENPKTGESLALPRRLARSARKRLARRKARLNHLKHLIANEFKLNYEDYQSFDESLAKAYKGSLISPYELRFRALNELLSKQDFARVILHIAKRRGYDDIKNNGDEEKSEILKAIKQNEEKLVNYQSVGEYLYKEYFQKFKENSKEFINVRNKKESYERCITQSFLKDELKLIFQKQREFGFSFSKKFEEEVLSVAFYKRALKDFSHLVGNCSFFTDEKRAPKNSPLAFMFVALTRIINILNNLKNTEGILYTKDDLNALLNEVLKNGTLTYKQTKKLLGLSDDYEFKGEKGTYFIEFKKYKEFIKALGEHNLSQDDLNEIAKDITLIKDEIKLKKALAKYDLNQNQIDSLSKLEFKDHLNISFKALKLITPLMLEGKKYDEACNELNLKVAINEDKKDFLPAFNETYYKDEVTNPVVLRAIKEYRKS

SEQ ID NO: 351 - protein, 984 aa, Campylobacter jejuni
MARILAFDIGISSIGWAFSENDELKDCGVRIFTKAENPKTGESLALPRRLARSARKRLARRKARLNHLKHLIANEFKLNYEDYQSFDESLAKAYKGSLISPYELRFRALNELLSKQDFARVILHIAKRRGYDDIKNNGDEEKSEILKAIKQNEEKLVNYQSVGEYLYKEYFQKFKENSKEFINVRNKKESYERCITQSFLKDELKLIFQKQREFGFSFSKKFEEEVLSVAFYKRALKDFSHLVGNCSFFTDEKRAPKNSPLAFMFVALTRIINLLNNLKNTEGILYTKDDLNALLNEVLKNGTLTYKQTKKLLGLSDDYEFKGEKGTYFIEFKKYKEFIKALDEHSLSQDDLNEIAKDITLIKDEIKLKKALAKYDLNQNQIDSLSKLEFKDHLNISFKALKLITPLMLEGKKYDEACNELNLKVAINEDKKDFLPAFNETYYKDEVTNPVVLRAIKEYRKILNALLKKYGKVHKINIELAREVGKNHSQRAKIEKEQNENYKAKKDAEIECEKLGLKINSKNILKLRLFKEQKEFCAYSGEKIKISDLQDEKMLEIDHIYPYSRSFDDSYMNKVLVFTKQNQEKLNKTPFEAFGNDGVKWQKIEVLAKNLPEKKQKRILDKNYKDKEQKDFKDRNLNDTRYIARLVLNYTKDYLDFLPLSDDENTKLNDTQKGSKVHVEAKSGMLTSALRHTWGFSTKDRNNHLHHAIDAAIIAYANNSIVKAFSDFKKEQESNSAELYAKKISELDYKNKRKFFEPFSGFRQKVLDKIDEIFVSKPERKKPSGALHEETFRKEEEFYQSYGGKEGVLKALELGKIRKVNGKIVKNGDMFRVDIFKHKKTNKFYAVPIYTMDFALKVLPNKAVARSKKGEIKDWILMDENYEFCFSLYKDSLILIQTKDMQEPELVYFNAFTSSTVSLVVSKHDNKFETLSKNQKILFKNANEKEVIAKSIGIQNLKVFEKYIVSALGEVTKAEFRQREDFKK

SEQ ID NO: 352 - protein, 984 aa, Campylobacter jejuni
MARILAFDIGISSIGWAFSENDELKDCGVRIFTKAENPKTGESLALPRRLARSARKRLARRKARLNHLKHLIANEFKLNYEDYQSFDESLAKAYKGSLISPYELRFRALNELLSKQDFARVILHIAKRRGYDDIKNSDDKEKGAILKAIKQNEEKLANYQSVGEYLYKEYFQKFKENSKEFTNVRNKKESYERCIAQSFLKDELKLIFKKQREFGFSFSKKFEEEVLSVAFYKRALKDFSHLVGNCSFFTDEKRAPKNSPLAFMFVALTRIINLLNNLKNTEGILYTKDDLNALLNEVLKNGTLTYKQTKKLLGLSDDYEFKGEKGTYFIEFKKYKEFIKALGDHSLSQDDLNEIAKDITLIKDEIKLKKALAKYDLNQNQIDSLSKLEFKDHLNISFKALKLITPLMLEGKKYDEACNELNLKVAINEDKKDFLPAFNETYYKDEVTNPVVLRAIKEYRKVLNALLKKYGKVHKINIELAREVGKNYSQRAKIEKEQNENYKAKKDAELECEKLGLKINSKNILKLRLFKEQKEFCAYSGEKIKISDLQDEKMLEIDHIYPYSRSFDDSYMNKVLVFTKQNQEKLNQTPFEAFGNDSAKWQKIEVLAKNLPTKKQKRILDKNYKDKEQKDFKDRNLNDTRYIARLVLNYTKDYLDFLPLSDDENTKLNDTQKGSKVHVEAKSGMLTSALRHTWGFSAKDRNNHLHHAIDAVIIAYANNSIVKAFSDFKKEQESNSAELYAKKISELDYKNKRKFFEPFSGFRQKVLDKIDEIFVSKPERKKPSGALHEETFRKEEEFYQSYGGKEGVLKALELGKIRKVNGKIVKNGDMFRVDIFKHKKTNKFYAVPIYTMDFALKVLPNKAVARSKKGEIKDWILMDENYEFCFSLYKDSLILIQTKDMQEPEFVYYNAFTSSTVSLIVSKHDNKFETLSKNQKILFKNANEKEVIAKSIGIQNLKVFEKYIVSALGEVTKAEFRQREDFKK

SEQ ID NO: 353 - protein, 984 aa, Campylobacter jejuni
MARILAFDIGISSIGWAFSENDELKDCGVRIFTKAENPKTGESLALPRRLARSARKRLARRKARLNHLKHLIANEFKLNYEDYQSFDESLAKAYKGSLISPYELRFRALNELLSKQDFARVILHIAKRRGYDDIKNSDDKEKGAILKAIKQNEEKLANYQSVGEYLYKEYFQKFKENSKEFTNVRNKKESYERCIAQSFLKDELKLIFKKQREFGFSFSKKFEEEVLSVAFYKRALKDFSHLVGNCSFFTDEKRAPKNSPLAFMFVALTRIINLLNNLKNTEGILYTKDDLNTLLNEVLKNGTLTYKQTKKLLGLSDDYEFKGEKGTYFIEFKKYKEFIKALGEHNLSQDDLNEIAKDITLIKDEIKLKKALAKYDLNQNQIDSLSKLEFKDHLNISFKALKLITPLMLEGKKYDEACNELNLKVAINEDKKDFLPAFNETYYKDEVTNPVVLRAIKEYRKVLNALLKKYGKVHKINIELAREVGKNYSQRAKIEKEQNENYKAKKDAELECEKLGLKINSKNILKLRLFKEQKEFCAYSGEKIKISDLQDEKMLEIDHIYPYSRSFDDSYMNKVLVFTKQNQEKLNKTPFEAFGNDSTKWQKIEVLAKNLPEKKQKRILDKNYKDKEQKDFKDRNLNDTRYIARLVLNYTKDYLDFLPLSDDENTKLNDTQKGLKVHVEAKSGMLTSALRHTWGFSAKDRNNHLHHAIDAVIIAYANNSIVKAFSDFKKEQESNSAELYAKKISELDYKNKRKFFEPFSGFRQKVLDKIDEIFVSKPERKKPSGALHEETFRKEEEFYQSYGGKEGVLKALELGKIRKVNGKIVKNGDMFRVDIFKHKKTNKFYAVPIYTMDFALKVLPNKAVARSKKGEIKDWILMDENYEFCFSLYKDSLILIQTKDMQEPEFVYYNAFTSSTVSLIVSKHDNKFETLSKNQKILFKNANEKEVIAKSIGIQNLKVFEKYIVSALGEVTKAEFRQREDFKK

SEQ ID NO: 354 - protein, 984 aa, Campylobacter jejuni
MARILAFDIGISSIGWAFSENDELKDCGVRIFTKAENPKTGESLALPRRLARSARKRLARRKARLNHLKHLIANEFKLNYEDYQSFDESLAKAYKGSLISPYELRFRALNELLSKQDFARVILHIAKRRGYDDIKNSDDKEKGAILKAIKQNEEKLANYQSVGEYLYKEYFQKFKENSKEFTNVRNKKESYERCIAQSFLKDELKLIFKKQREFGFSFSKKFEEEVLSVAFYKRALKDFSHLVGNCSFFTDEKRAPKNSPLAFMFVALTRIINLLNNLKNTEGILYTKDDLNALLNEVLKNGTLTYKQTKKLLGLSDDYEFKGEKGTYFIEFKKYKEFIKALGDHSLSQDDLNEIAKDITLIKDEIKLKKALAKYDLNQNQIDSLSKLEFKDHLNISFKALKLITPLMLEGKKYDEACNELNLKVAINEDKKDFLPAFNETYYKDEVTNPVVLRAIKEYRKVLNALLKKYGKVHKINIELAREVGKNYSQRAKIEKEQNENYKAKKDAELECEKLGLKINSKNILKLRLFKEQKEFCAYSGEKIKISDLQDEKMLEIDHIYPYSRSFDDSYMNKVLVFTKQNQEKLNQTPFEAFGNDSAKWQKIEVLAKNLPTKKQKRILDKNYKDKEQKNFKDRNLNDTRYIARLVLNYTKDYLDFLPLSDDENTKLNDTQKGSKVHVEAKSGMLTSALRHTWGFSAKDRNNHLHHTIDAVIIAYANNSIVKAFSDFKKEQESNSAELYAKKISELDYKNKRKFFEPFSGFRQKVLDKIDEIFVSKPERKKPSGALHEETFRKEEEFYQSYGGKEGVLKALELGKIRKVNGKIVKNGDMFRVDIFKHKKTNKFYAVPIYTMDFALKVLPNKAVARSKKGEIKDWILMDENYEFCFSLYKDSLILIQTKDMQEPEFVYYNAFTSSTVSLIVSKHDNKFETLSKNQKILFKNANEKEVIAKSIGIQNLKVFEKYIVSALGEVTKAEFRQREDFKK

SEQ ID NO: 355 - protein, 984 aa, Campylobacter jejuni
MARILAFDIGISSIGWAFSENDELKDCGVRIFTKAENPKTGESLALPRRLARSARKRLARRKARLNHLKHLIANEFKLNYEDYQSFDESLAKAYKGSLISPYELRFRALNELLSKQDFARVILHIAKRRGYDDIKNSDDKEKGAILKAIKQNEEKLANYQSVGEYLYKEYFQKFKENSKEFTNVRNKKESYERCIAQSFLKDELKLIFKKQREFGFSFSKKFEEEVLSVAFYKRALKDFSHLVGNCSFFTDEKRAPKNSPLAFMFVALTRIINLLNNLKNTEGILYTKDDLNTFLNEVLKNGTLTYKQTKKLLGLSDDYEFKGEKGTYFIEFKKYKEFIKALGDHNLSQDDLNEIAKDITLIKDEIKLKKALAKYDLNQNQIDSLSKLEFKDHLNISFKALKLITPLMLEGKKYDEACNELNLKVAINEDKKDFLPAFNETYYKDEVTNPVVLRAIKEYRKVLNALLKKYGKVHKINIELAREVGKNHSQRAKIEKEQNENYKAKKDAELECEKLGLKINSKNILKLRLFKEQKEFCAYSGEKIKISDLQDEKMLEIDHIYPYSRSFDDSYMNKVLVFTKQNQEKLNKTPFEAFGNDSAKWQKIEVLAKNLPTKKQKRILDKNYKDKEQKDFKDRNLNDTRYIARLVLNYTKDYLDFLPLSDDENTKLNDTQKGSKVHVEAKSGMLTSALRHTWGFSTKDRNNHLHHAIDAVIIAYANNSIVKAFSDFKKEQESNSAELYAKKISELDYKNKRKFFEPFSGFRQKVLDKIDEIFVSKPERKKPSGALHEETFRKEEEFYQSYGGKEGVLKALELGKIRKVNGKIVKNGDMFRVDIFKHKKTNKFYAVPIYTMDFALKVLPNKAVARSKKGEIKDWILMDENYEFCFSLYKDSLILIQTKDMQEPEFVYYNAFTSSTVSLIVSKHDNKFETLSKNQKILFKNANEKEVIAKSIGIQNLKVFEKYIVSALGEVTKAEFRQREDFKK

SEQ ID NO: 356 - protein, 987 aa, Campylobacter jejuni
MARILAFDIGISSIGWAFSENDELKDCGVRIFTKAENPKTGESLALPRRLARSARKRLARRKARLNHLKHLIANEFKLNYEDYQSFDESLAKAYKGSLISPYELRFRALNELLSKQDFARVILHIAKRRGYDDIKNSDDKEKGAILKAIKQNEEKLANYQSVGEYLYKEYFQKFKENSKEFTNVRNKKESYERCIAQSFLKDELKLIFKKQREFGFSFSKKFEEEVLSVAFYKRALKDFSHLVGNCSFFTDEKRAPKNSPLAFMFVALTRIINLLNNLKNTEGILYTKDDLNTLLNEVLKNGTLTYKQTKKLLGLSDDYEFKGEKGTYFIEFKKYKEFIKSLGDHSLSQDDLNEIAKDITLIKDEIKLKKALAKYDLNQNQIDSLSKLEFKDHLNISFKALKLITPLMLEGKKYDEACNELNLKVAINEDKKDFLPAFNETYYKDEVTNPVVLRAIKEYRKVLNALLKKYGKVHKINIELAREVGKNHSQRAKIEKEQNENYKAKKDAELECEKLGLKINSKNILKLRLFKEQKEFCAYSGEKIKISDLQDEKMLEIDHIYPYSRSFDDSYMNKVLVFTKQNQEKLNQTPFEAFGNDSAKWQKIEVLAKNLPTKKQKRILDKNYKDKEQKNFKDRNLNDTRYIARLVLNYTKDYLDFLPLSDDENTKLNDTQKGSKVHVEAKSGMLTSALRHTWGFSAKDRNNHLHHAIDAVIIAYANNSIVKAFSDFKKEQESNSAELYAKKISELDYKNKRKFFEPFSGFRQKVLDKIDEIFVSKPERKKPSGALHEETFRKEEEFYQSYGGKEGVLKALELGKIRKVNGKIVKNGDMFRVDIFKHKKTNKFYAVPIYTMDFALKVLPNKAVARSKKGEIKDWILMDENYEFCFSLYKDSLILIQTKDMQEPEFVYYNAFTSSTVSLIVSKHDNKFETLSKNQKILFKNANEKEVIAKSIGIQNLKVFEKYIVSALGEVTKAEFRQREDFKNELR

SEQ ID NO: 357 - protein, 987 aa, Campylobacter jejuni
MARILAFDIGISSIGWAFSENDELKDCGVRIFTKAENPKTGESLALPRRLARSARKRLARRKARLNHLKHLIANEFKLNYEDYQSFDESLAKAYKGSLISPYELRFRALNELLSKQDFARVILHIAKRRGYDDIKNSDDKEKGAILKAIKQNEEKLANYQSVGEYLYKEYFQKFKENSKEFTNVRNKKESYERCIAQSFLKDELKLIFKKQREFGFSFSKKFEEEVLSVAFYKRALKDFSHLVGNCSFFTDEKRAPKNSPLAFMFVALTRIINLLNNLKNTEGILYTKDDLNALLNEVLKNGTLTYKQTKKLLGLSDDYEFKGEKGTYFIEFKKYKEFIKALGDHSLSQDDLNEIAKDITLIKDEIKLKKALVKYDLNQNQIDSLSKLEFKDHLNISFKALKLITPLMLEGKKYDEACNELNLKVAINEDKKDFLPAFNETYYKDEVTNPVVLRAIKEYRKVLNALLKKYGKVHKINIELAREVGKNYSQRAKIEKEQNENYKAKKDAELECEKLGLKINSKNILKLRLFKEQKEFCAYSGEKIKISDLQDEKMLEIDHIYPYSRSFDDSYMNKVLVFTKQNQEKLNQTPFEAFGNDSAKWQKIEVLAKNLPTKKQKRILDKNYKDKEQKDFKDRNLNDTRYIARLVLNYTKDYLDFLPLSDDENTKLNDTQKGSKVHVEAKSGMLTSALRHTWGFSAKDRNNHLHHAIDAVIIAYANNSIVKAFSDFKKEQESNSAELYAKKISELDYKNKRKFFEPFSGFRQKVLDKIDEIFVSKPERKKPSGALHEETFRKEEEFYQSYGGKEGVLKALELGKIRKVNGKIVKNGDMFRVDIFKHKKTNKFYAVPIYTMDFALKVLPNKAVARSKKGEIKDWILMDENYEFCFSLYKDSLILIQTKDMQEPELVYFNAFTSSTVSLIVSKHDNKFETLSKNQKILFKNANEKEVIAKSIGIQNLKVFEKYIVSALGEVTKAEFRQREDFKNELR

SEQ ID NO: 358 - protein, 983 aa, Campylobacter jejuni; identical to SEQ ID NO: 236

SEQ ID NO: 359 - protein, 987 aa, Campylobacter jejuni
MARILAFDIGISSIGWAFSENDELKDCGVRIFTKAENPKTGESLALPRRLARSARKRLARRKARLNHLKHLIANEFKLNYEDYQSFDESLAKAYKGSLISPYELRFRALNELLSKQDFARVILHIAKRRGYDDIKNSDDKEKGAILKAIKQNEEKLVNYQSVGEYLYKEYFQKFKENSKEFTNVRNKKESYERCIAQSFLKDELKLIFKKQREFGFSFSKKFEEEVLSVAFYKRALKDFSHLVGNCSFFTDEKRAPKNSPLAFMFVALTRIINLLNNLKNTEGILYTKDDLNALLNEVLKNGTLTYKQTKKLLGLSDDYEFKGEKGTYFIEFKKYKEFIKALGDHSLSQDDLNEIAKDITLIKDEIKLKKALAKYDLNQNQIDSLSKLEFKDHLNISFKALKLITPLMLEGKKYDEACNELNLKVAINEDKKDFLPAFNETYYKDEVTNPVVLRAIKEYRKVLNALLKKYGKVHKINIELAREVGKNYSQRAKIEKEQNENYKAKKDAELECEKLGLKINSKNILKLRLFKEQKEFCAYSGEKIKISDLQDEKMLEIDHIYPYSRSFDDSYMNKVLVFTKQNQEKLNQTPFEAFGNDSAKWQKIEVLAKNLPTKKQKRILDKNYKDKEQKDFKDRNLNDTRYIARLVLNYTKDYLDFLPLSDDENTKLNDTQKGSKVHVEAKSGMLTSALRHTWGFSAKDRNNHLHHAIDAVIIAYANNSIVKAFSDFKKEQESNSAELYAKKISELDYKNKRKFFEPFSGFRQKVLDKIDEIFVSKPERKKPSGALHEETFRKEEEFYQSYGGKEGVLKALELGKIRKVNGKIVKNGDMFRVDIFKHKKTNKFYAVPIYTMDFALKVLPNKAVARSEKGEIKDWILMDENYEFCFSLYKDSLILIQTKDMQEPELVYFNAFTSSTVSLIVSKHDNKFETLSKNQKILFKNANEKEVIAKSIGIQNLKVFEKYIVSALGEVTKAEFRQREDFKNELR

SEQ ID NO: 360 - protein, 987 aa, Campylobacter jejuni
MARILAFDIGISSIGWAFSENDELKDCGVRIFTKAENPKTGESLALPRRLARSARKRLARRKARLNHLKHLIANEFKLNYEDYQSFDESLAKAYKGSLISPYELRFRALNELLSKQDFARVILHIAKRRGYDNIKNSDNEEKSEILKAIKQNEEKLVNYQSVGEYLYKEYFQKFKENSKEFINVRNKKESYERCIAQSFLKDELKLIFQKQREFGLSFSKKFEEEVLSVAFYKRALKDFSHLVGNCSFFTDEKRAPKNSPLAFMFVALTRIINLLNNLKNTEGILYTKDDLNTLLNEVLKNGTLTYKQTKKLLGLSDDYEFKGEKGTYFIEFKKYKEFIKALGDHSLSQDDLNEIAKDITLIKDEIKLKKALAKYDLNQNQIDSLSKLEFKDHLNISFKALKLITPLMLEGKKYDEACNELNLKVVINEDKKDFLPAFNETYYKDEVTNPVVLRAIKEYRKVLNALLKKYGKVHKINIELAREVGKNHSQRAKIEKEQNENYKAKKDAELECEKLGLKINNKNILKLRLFKEQKEFCAYSGEKIKLSDLQDEKMLEIDHIYPYSRSFDDSYMNKVLVFTKQNQEKLNKTPFEAFGNDSTKWQKIEVLAKNLPTKKQKRILDKNYKDKEQKDFKDRNLNDTRYIARLVLNYTKDYLDFLPLSDDENTKLNDIQKGSKVHVEAKSGMLTSALRHTWGFSTKDRNNHLHHAIDAVIIAYANNSIVKAFSDFKKEQESNSAELYAKKISELDYKNKRKFFEPFSGFRQKVLDKIDEIFVSKPERKKPSGALHEETFRKEEEFYQSYGGKEGVLKALELGKIRKVNGKIVKNGDMFRVDIFKHKKTNKFYAVPIYTMDFALKVLPNKAVVQGKDKKSGLIKDWILMDENYEFCFSLYKDSLILIQTKDMQEPEFVYYNAFTSSTVSLIVSKHDNKFETLSKNQKILFKNANEKEVIAKSIGIQNLKVFEKYIVSALGEVTKAEFRQREDFKK

SEQ ID NO: 361 - protein, 984 aa, Campylobacter jejuni
MARILAFDIGISSIGWAFSENDELKDCGVRIFTKAENPKTGESLALPRRLARSARKRLARRKARLNHLKHLIANEFKLNYEDYQSFDESLAKAYKGSLISPYELRFRALNELLSKQDFARVILHIVKRRGYDDIKNSDDKEKGAILKAIKQNEEKLANYQSVGEYLYKEYFQKFKENSKEFTNVRNKKESYERCIAQSFLKDELKLIFKKQREFGFSFSKKFEEEVLSVAFYKRALKDFSHLVGNCSFFTDEKRAPKNSPLAFMFVALTRIINLLNNLKNTEGILYTKDDLNTLLNEVLKNGTLTYKQTKKLLGLSDDYEFKGEKGTYFIEFKKYKEFIKALGDHSLSQDDLNEIAKDITLIKDEIKLKKALAKYDLNQNQIDSLSKLEFKDHLNISFKALKLITPLMLEGKKYDEACNELNLKVAINEDKKDFLPAFNETYYKDEVTNPVVLRAIKEYRKVLNALLKKYGKVHKINIELAREVGKNHSQRAKIEKEQNENYKAKKDAEFECEKLGLKINSKNILKLRLFKEQKEFCAYSGEKIKISDLQDEKMLEIDHIYPYSRSFDDSYMNKVLVFTKQNQEKLNKTPFEAFGNDSAKWQKIEVLAKNLPTKKQKRILDKNYKDKEQKDFKDRNLNDTRYIARLVLNYTKDYLDFLPLSDDENTKLNDTQKGSKVHVEAKSGMLTSALRHTWGFSTKDRNNHLHHAIDAVIIAYANNSIVKAFSDFKKEQESNSAELYAKKISELDYKNKRKFFEPFSGFRQKVLDKIDEIFVSKPERKKPSGALHEETFRKEEEFYQSYGGKEGVLKALELGKIRKVNGKIVKNGDMFRVDIFKHKKTNKFYAVPIYTMDFALKVLPNKAVARSKKGEIKDWILMDENYEFCFSLYKDSLILIQTKDMQEPEFVYYNAFTSSTVSLIVSKHDNKFETLSKNQKILFKNANEKEVIAKSIGIQNLKVFEKYIVSALGEVTKAEFRQREDFKK

SEQ ID NO: 362 - protein, 984 aa, Campylobacter jejuni
MARILAFDIGISSIGWAFSENDELKDCGVRIFTKAENPKTGESLALPRRLARSARKRLARRKARLNHLKHLIANEFKLNYEDYQSFDESLAKAYKGSLISPYELRFRALNELLSKQDFARVILHIVKRRGYDDIKNSDDKEKGTILKAIKQNEEKLANYQSVGEYLYKEYFQKFKENSKEFTNVRNKKESYERCIAQSFLKDELKLIFKKQREFGFSFSKKFEEEVLSVAFYKRALKDFSHLVGNCSFFTDEKRAPKNSPLAFMFVALTRIINLLNNLKNTEGILYTKDDLNTLLNEVLKNGTLTYKQTKKLLGLSDDYEFKGEKGTYFIEFKKYKEFIKALGEHNLSQDDLNEIAKDITLIKDEIKLKKALAKYDLNQNQIDSLSKLEFKDHLNISFKALKLITPLMLEGKKYDEACNELNLKVAINEDKKDFLPAFNETYYKDEVTNPVVLRAIKEYRKVLNALLKKYGKVHKINIELAREVGKNYSQRAKIEKEQNENYKAKKDAELECEKLGLKINSKNILKLRLFKEQKEFCAYSGEKIKISDLQDEKMLEIDHIYPYSRSFDDSYMNKVLVFTKQNQEKLNQTPFEAFGNDSAKWQKIEVLAKNLPTKKQKRILDKNYKDKEQKDFKDRNLNDTRYIARLVLNYTKDYLDFLPLSDDENTKLNDTQKGSKVHVEAKSGMLTSALRHTWGFSAKDRNNHLHHAIDAVIIAYANNSIVKAFSDFKKEQESNSAELYAKKISELDYKNKRKFFEPFSGFRQKVLDKIDEIFVSKPERKKPSGALHEETFRKEEEFYQSYGGKEGVLKALELGKIRKVNGKIVKNGDMFRVDIFKHKKTNKFYAVPIYTMDFALKVLPNKAVARSKKGEIKDWILMDENYEFCFSLYKDSLILIQTKDMQEPEFVYYNAFTSSTVSLIVSKHDNKFETLSKNQKILFKNANEKEVIAKSIGIQNLKVFEKYIVSALGEVTKAEFRQREDFKK

SEQ ID NO: 363 - protein, 987 aa, Campylobacter jejuni
MARILAFDIGISSIGWAFSENDELKDCGVRIFTKAENPKTGESLALPRRLARSARKRLARRKARLNHLKHLIANEFKLNYEDYQSFNESLAKAYKGSLISPYELRFRALNELLSKQDFARVILHIAKRRGYDDIKNSDDKEKGAILKVIKQNEEKLANYQSVGEYLYKEYFQKFKENSKEFTNVRNKKESYERCIAQSFLKDELKLIFQKQREFGFSFSKKFEEEVLSVAFYKRALKDFSHLVGNCSFFTDEKRAPKNSPLAFMFVALTRIINLLNNLKNTEGILYTKDDLNALLNEVLKNGTLTYKQTKKLLGLSDDYEFKGEKGTYFIEFKKYKEFIKALGDHSLSQDDLNEIAKDITLIKDEIKLKKALAKYDLNQNQIDSLSKLEFKDHLNISFKALKLITPLMLEGKKYDEACNELNLKVAINEDKKDFLPAFNETYYKDEVTNPVVLRAIKEYRKVLNALLKKYGKVHKINIELAREVGKNYSQRAKIEKEQNENYKAKKDAELECEKLGLKINSKNILKLRLFKEQKEFCAYSGEKIKISDLQDEKMLEIDHIYPYSRSFDDSYMNKVLVFTKQNQEKLNQTPFEAFGNDSAKWQKIEVLAKNLPTKKQKRILDKNYKDKEQKDFKDRNLNDTRYIARLVLNYTKDYLDFLPLSDDENTKLNDTQKGSKVHVEAKSGMLTSALRHTWGFSAKDRNNHLHHAIDAVIIAYANNSIVKAFSDFKKEQESNSAELYAKKISELDYKNKRKFFEPFSGFRQKVLDKIDEIFVSKPERKKPSGALHEETFRKEEEFYQSYGGKEGVLKALELGKIRKVNGKIVKNGDMFRVDIFKHKKTNKFYAVPIYTMDFALKVLPNKAVARSKKGEIKDWILMDENYEFCFSLYKDSLILIQTKDMQEPELVYFNAFTSSTVSLIVSKHDNKFETLSKNQKILFKNANEKEVIAKSIGIQNLKVFEKYIVSALGEVTKAEFRQREDFKNELR

SEQ ID NO: 364 - protein, 984 aa, Campylobacter jejuni
MARILAFDIGISSIGWAFSENDELKDCGVRIFTKAENPKTGESLALPRRLARSARKRLARRKARLNRLKHLIANEFKLNYEDYQSFDESLAKAYKGSLISPYELRFRALNELLSKQDFARVILHIAKRRGYDDIKNSDDKEKGAILKAIKQNEEKLANYQSVGEYLYKEYFQKFKENSKEFTNVRNKKESYERCIAQSFLKDELKLIFKKQREFGFSFSKKFEEEVLSVAFYKRALKDFSHLVGNCSFFTDEKRAPKNSPLAFMFVALTRIINLLNNLKNTEGILYTKDDLNALLNEVLKNGTLTYKQTKKLLGLSDDYEFKGEKGTYFIEFKKYKEFIKALGDHSLNQDDLNEIAKDITLIKDEIKLKKALAKYDLNQNQIDSLSKLEFKDHLNISFKALKLITPLMLEGKKYDEACNELNLKVAINEDKKDFLPAFNETYYKDEVTNPVVLRAIKEYRKVLNALLKKYGKVHKINIELAREVGKNYSQRAKIEKEQNENYKAKKDAELECEKLGLKINSKNILKLRLFKEQKEFCVYSGEKIKISDLQDEKMLEIDHIYPYSRSFDDSYMNKVLVFTKQNQEKLNQTPFEAFGNDSAKWQKIEVLAKNLPTKKQKRILDKNYKDKEQKDFKDRNLNDTRYIARLVLNYTKDYLDFLPLSDDENTKLNDTQKGSKVYVEAKSGMLTSALRHTWGFSTKDRNNHLHHAIDAVIIAYANNSIVKAFSDFKKEQESNSAELYAKKISELDYKNKRKFFEPFSGFRQKVLDKIDEIFVSKPERKKPSGALHEETFRKEEEFYQSYGGKEGVLKALELGKIRKVNGKIVKNGDMFRVDIFKHKKTNKFYAVPIYTMDFALKVLPNKAVARSKKGEIKDWILMDENYEFCFSLYKDSLILIQTKDMQEPEFVYYNAFTSSTVSLIVSKHDNKFETLSKNQKILFKNANEKEVIAKSIGIQNLKVFEKYIVSALGEVTKAEFRQREDFKK

SEQ ID NO: 365 - protein, 984 aa, Campylobacter jejuni
MARILAFDIGISSIGWAFSENDELKDCGVRIFTKVENPKTGESLALPRRLARSARKRLARRKARLNHLKHLIANEFKLNYEDYQSFDESLAKAYKGSLISPYELRFRALNELLSKQDFARVILHIAKRRGYDDIKNSDDKEKGAILKAIKQNEEKLANYQSVGEYLYKEYFQKFKENSKEFTNVRNKKESYERCIAQSFLKDELKLIFKKQREFGFSFLKKFEEEVLSVAFYKRALKDFSHLVGNCSFFTDEKRAPKNSPLAFMFVALTRIINLLNNLKNTEGILYTKDDLNALLNEVLKNGTLTYKQTKKLLGLSDDYEFKGEKGTYFIEFKKYKEFIKALGEHNLSQDDLNEIAKDITLIKDEIKLKKALAKYDLNQNQIDSLSKLEFKDHLNISFKALKLITPLMLEGKKYDEAYNELNLKVAINEDKKDFLPAFNETYYKDEVTNPVVLRAIKEYRKVLNALLKKYGKVHKINIELAREVGKNHSQRAKIEKEQNENYKAKKDAELECEKLGLKINSKNILKLRLFKEQKEFCAYSGEKIKISDLQDEKMLEIDHIYPYSRSFDDSYMNKVLVFTKQNQEKLNQTPFEAFGNDSAKWQKIEVLAKNLPTKKQKRILDKNYKDKEQKDFKDRNLNDTRYIARLVLNYTKDYLDFLPLSDDENTKLNDTQKGSKVHVEAKSGMLTSALRHTWGFSAKDRNNHLHHAIDAVIIAYANNSIVKAFSDFKKEQESNSAELYAKKISELDYKNKRKFFEPFSGFRQKVLDKIDEIFVSKPERKKPSGALHEETFRKEEEFYQSYGGKEGVLKALELGKIRKVNGKIVKNGDMFRVDIFKHKKTNKFYAVPIYTMDFALKVLPNKAVARSKKGEIKDWILMDENYEFCFSLYKDSLILIQTKDMQEPELVYFNAFTSSTVSLIVSKHDNKFETLSKNQKILFKNANEKEVIAKSIGIQNLKVFEKYIVSALGEVTKAEFRQREDFKK

SEQ ID NO: 366 - protein, 984 aa, Campylobacter jejuni
MARILAFDIGISSIGWAFSENDELKDCGVRIFTKVENPKTGESLALPRRLARSARKRLARRKARLNHLKHLIANEFKLNYEDYQSFDESLAKAYKGSLISPYELRFRALNELLSKQDFARVILHIAKRRGYDDIKNSDDKEKGAILKAIKQNEEKLANYQSVGEYLYKEYFQKFKENSKEFTNVRNKKESYERCIAQSFLKDELKLIFKKQREFGFSFSKKFEEEVLSVAFYKRALKDFSHLVGNCSFFTDEKRAPKNSPLAFMFVALTRIINLLNNLKNTEGILYTKDDLNALLNEVLKNGTLTYKQTKKLLGLSDDYEFKGEKGTYFIEFKKYKEFIKALGEHNLSQDDLNEIAKDITLIKDEIKLKKALAKYDLNQNQIDSLSKLEFKDHLNISFKALKLITPLMLEGKKYDEACNELNLKVAINEDKKDFLPAFNETYYKDEVTNPVVLRAIKEYRKVLNALLKKYGKVHKINIELAREVGKNHSQRAKIEKEQNENYKAKKDAELECEKLGLKINSKNILKLRLFKEQKEFCAYSGEKIKISDLQDEKMLEIDHIYPYSRSFDDSYMNKVLVFTKQNQEKLNKTPFEAFGNDSAKWQKIEVLAKNLPTKKQKRILDKNYKDKEQKDFKDRNLNDTRYIARLVLNYTKDYLDFLPLSNDENTKLNDTQKGSKVHVEAKSGMLTSALRHTWGFSTKDRNNHLHHAIDAVIIAYANNSIVKAFSDFKKEQESNSAELYAKKISELDYKNKRKFFEPFSGFRQKVLDKIDEIFVSKPERKKPSGALHEETFRKEEEFYQSYGGKEGVLKALELGKIRKVNGKIVKNGDMFRVDIFKHKKTNKFYAVPIYTMDFALKVLPNKAVARSKKGEIKDWILMDENYEFCFSLYKDSLILIQTKDMQEPEFVYYNAFTSSTVSLIVSKHDNKFETLSKNQKILFKNANEKEVIAKSIGIQNLKVFEKYIVSALGEVTKAEFRQREDFKK

SEQ ID NO: 367 - protein, 984 aa, Campylobacter jejuni
MARILAFDIGISSIGWAFSENDELKDCGVRIFTKVENPKTGESLALPRRLARSARKRLARRKARLNHLKHLIANEFKLNYEDYQSFDESLAKAYKGSLISPYELRFRALNELLSKQDFARVILHIAKRRGYDDIKNSDDKEKGAILKAIKQNEEKLANYQSVGEYLYKEYFQKFKENSKEFTNVRNKKESYERCIAQSFLKDELKLIFKKQREFGFSFSKKFEEEVLSVAFYKRALKDFSHLVGNCSFFTDEKRAPKNSPLAFMFVALTRIINLLNNLKNTEGILYTKDDLNALLNEVLKNGTLTYKQTKKLLGLSDDYEFKGEKGTYFIEFKKYKEFIKALGEHNLSQDDLNEIAKDITLIKDEIKLKKALAKYDLNQNQIDSLSKLEFKDHLNISFKALKLITPLMLEGKKYDEACNELNLKVAINEDKKDFLPAFNETYYKDEVTNPVVLRAIKEYRKVLNALLKKYGKVHKINIELAREVGKNHSQRAKIEKEQNENYKAKKDAELECEKLGLKINSKNILKLRLFKEQKEFCAYSGEKIKISDLQDEKMLEIDHIYPYSRSFDDSYMNKVLVFTKQNQEKLNKTPFEAFGNDSAKWQKIEVLAKNLPTKKQKRILDKNYKDKEQKDFKDRNLNDTRYIARLVLNYTKDYLDFLPLSDDENTKLNDTQKGSKVHVEAKSGMLTSALRHTWGFSTKDRNNHLHHAIDAVIIAYANNSIVKAFSDFKKEQESNSAELYAKKISELDYKNKRKFFEPFSGFRQKVLDKIDEIFVSKPERKKPSGALHEETFRKEEEFYQSYGGKEGVLKALELGKIRKVNGKIVKNGDMFRVDIFKHKKTNKFYAVPIYTMDFALKVLPNKAVARSKKGEIKDWILMDENYEFCFSLYKDSLILIQTKDMQEPEFVYYNAFTSSTVSLIVSKHDNKFETLSKNQKILFKNANEKEVIAKSIGIQNLKVFEKYIVSALGEVTKAEFRQREDFKK

SEQ ID NO: 368 - protein, 984 aa, Campylobacter jejuni
MARILAFDIGISSIGWAFSENDELKDCGVRIFTKVENPKTGESLALPRRLARSARKRLARRKARLNHLKHLIANEFKLNYEDYQSFDESLAKAYKGSLISPYELRFRALNELLSKQDFARVILHIAKRRGYDDIKNSDDKEKGAILKAIKQNEEKLANYQSVGEYLYKEYFQKFKENSKEFTNVRNKKESYERCIAQSFLKDELKLIFKKQREFGFSFSKKFEEEVLSVAFYKRALKDFSHLVGNCSFFTDEKRAPKNSPLAFMFVTLTRIINLLNNLKNTEGILYTKDDLNALLNEVLKNGTLTYKQTKKLLGLSDDYEFKGEKGTYFIEFKKYKEFIKALGEHNLSQDDLNEIAKDITLIKDEIKLKKALAKYDLNQNQIDSLSKLEFKDHLNISFKALKLITPLMLEGKKYDEACNELNLKVAINEDKKDFLPAFNETYYKDEVTNPVVLRAIKEYRKVLNALLKKYGKVHKINIELAREVGKNHSQRAKIEKEQNENYKAKKDAELECEKLGLKINSKNILKLRLFKEQKEFCAYSGEKIKISDLQDEKMLEIDHIYPYSRSFDDSYMNKVLVFTKQNQEKLNKTPFEAFGNDSAKWQKIEVLAKNLPTKKQKRILDKNYKDKEQKDFKDRNLNDTRYIARLVLNYTKDYLDFLPLSDDENTKLNDTQKGSKVHVEAKSGMLTSALRHTWGFSTKDRNNHLHHAIDAVIIAYANNSIVKAFSDFKKEQESNSAELYAKKISELDYKNKRKFFEPFSGFRQKVLDKIDEIFVSKPERKKPSGALHEETFRKEEEFYQSYGGKEGVLKALELGKIRKVNGKIVKNGDMFRVDIFKHKKTNKFYAVPIYTMDFALKVLPNKAVARSKKGEIKDWILMDENYEFCFSLYKDSLILIQTKDMQEPEFVYYNAFTSSTVSLIVSKHDNKFETLSKNQKILFKNANEKEVIAKSIGIQNLKVFEKYIVSALGEVTKAEFRQREDFKK

SEQ ID NO: 369 - protein, 984 aa, Campylobacter jejuni
MARILAFDIGISSIGWAFSENDELKDCGVRIFTKVENPKTGESLALPRRLARSARKRLARRKARLNHLKHLIANEFKLNYEDYQSFDESLAKAYKGSLISPYELRFRALNELLSKQDFARVILHIAKRRGYDDIKNSDDKEKGAILKAIKQNEEKLANYQSVGEYLYKEYFQKFKENSKEFTNVRNKKESYERCIAQSFLKDELKLIFKKQREFGFSFSKKFEEEVLSVAFYKRALKDFSHLVGNCSFFTDEKRAPKNSPLAFMFVALTRIINLLNNLKNTEGILYTKDDLNALLNEVLKNGTLTYKQTKKLLGLSDDYEFKGEKGTYFIEFKKYKEFIKALGEHNLSQDDLNEIAKDITLIKDEIKLKKALAKYDLNQNQIDSLSKLEFKDHLNISFKALKLITPLMLEGKKYDEACNELNLKVAINEDKKDFLPAFNETYYKDEVTNPVVLRAIKEYRKVLNALLKKYGKVHKINIELAREVGKNHSQRAKIEKEQNENYKAKKDAELECEKLGLKINSKNILKLRLFKEQKEFCAYSGEKIKISDLQDEKMLEIDHIYPYSRSFDDSYMNKVLVFTKQNQEKLNKTPFEAFGNDSAKWQKIEVLAKNLPTKKQKRILDKNYKDKEQKDFKDRNLNDTRYIARLVLNYTKDYLDFLPLSDDENTKLNDTQKGSKVHVEAKSGMLTSALRHTWGFSTKDRNNHLHHAIDAVIIAYANNSIVKAFSDFKKEQESNSAELYAKKISELDYKNKRKFFEPFSGFRQKVLDKIDEIFVSKPERKKPSGALHEETFRKEEEFYQSYGGKEGVLKALELGKIRKVNGKIVKNGDMFRVDIFKHKKTNKFYAVPIYTMDFALKVLPNKAVARSKKGEIKDWILMDENYEFCFSLYKDSLILIQTKDMQEPEFVYYNAFTSSTVSLIVSKHDNKFETLSKNQKILFKNANEKEVIAKSIGIQNLKVFEKYIVSALGEVTKAEFIQREDFKK

SEQ ID NO: 370 - protein, 987 aa, Campylobacter jejuni
MARILAFDIGISSIGWAFSENDELKDCGVRIFTKVENPKTGESLALPRRLARSARKRLARRKARLNHLKHLIANEFKLNYEDYQSFDESLAKAYKGSLISPYELRFRALNELLSKQDFARVILHIAKRRGYDDIKNSDDKEKGAILKAIKQNEEKLANYQSVGEYLYKEYFQKFKENSKEFTNVRNKKESYERCIAQSFLKDELKLIFKKQREFGFSFSKKFEEEVLSVAFYKRALKDFSHLVGNCSFFTDEKRVPKNSPLAFMFVALTRIINLLNNLKNTEGILYTKDDLNALLNEVLKNGTLTYKQTKKLLGLSDDYEFKGEKGTYFIEFKKYKEFIKALGEHNLSQDDLNEIAKDITLIKDEIKLKKALAKYDLNQNQIDSLSKLEFKDHLNISFKALKLITPLMLEGKKYDEACNELNLKVAINEDKKDFLPAFNETYYKDEVTNPVVLRAIKEYRKVLNALLKKYGKVHKINIELAREVGKNHSQRAKIEKEQNENYKAKKDAELECEKLGLKINSKNILKLRLFKEQKEFCAYSGEKIKISDLQDEKMLEIDHIYPYSRSFDDSYMNKVLVFTKQNQEKLNQTPFEAFGNDSAKWQKIEVLAKNLPTKKQKRILDKNYKDKEQKNFKDRNLNDTRYIARLVLNYTKDYLDFLPLSDDENTKLNDTQKGSKVHVEAKSGMLTSALRHTWGFSAKDRNNHLHHAIDAVIIAYANNSIVKAFSDFKKEQESNSAELYAKKISELDYKNKRKFFEPFSGFRQKVLDKIDEIFVSKPERKKPSGALHEETFRKEEEFYQSYGGKEGVLKALELGKIRKVNGKIVKNGDMFRVDIFKHKKTNKFYGVPIYTMDFALKVLPNKAVARSKKGEIKDWILMDENYEFCFSLYKDSLILIQTKDMQEPEFVYYNAFTSSTVSLIVSKHDNKFETLSKNQKILFKNANEKEVIAKSIGIQNLKVFEKYIVSALGEVTKAEFRQREDFKNELR

SEQ ID NO: 371 - protein, 984 aa, Campylobacter jejuni
MARILAFDIGISSIGWAFSENDELKDCGVRIFTKVENPKTGESLALPRRLARSARKRLARRKVRLNHLKHLIANEFKLNYEDYQSFDESLAKAYKGSLISPYELRFRALNELLSKQDFARVILHIAKRRGYDDIKNSDDKEKGAILKAIKQNEEKLANYQSVGEYLYKEYFQKFKENSKEFTNVRNKKESYERCIAQSFLKDELKLIFKKQREFGFSFSKKFEEEVLSVAFYKRALKDFSHLVGNCSFFTDEKRAPKNSPLAFMFVALTRIINLLNNLKNTEGILYTKDDLNALLNEVLKNGTLTYKQTKKLLGLSDDYEFKGEKGTYFIEFKKYKEFIKALGEHNLSQDDLNEIAKDITLIKDEIKLKKALAKYDLNQNQIDSLSKLEFKDHLNISFKALKLITPLMLEGKKYDEACNELNLKVAINEDKKDFLPAFNETYYKDEVTNPVVLRAIKEYRKVLNALLKKYGKVHKINIELAREVGKNHSQRAKIEKEQNENYKAKKDAELECEKLGLKINSKNILKLRLFKEQKEFCAYSGEKIKISDLQDEKMLEIDHIYPYSRSFDDSYMNKVLVFTKQNQEKLNKTPFEAFGNDSAKWQKIEVLAKNLPTKKQKRILDKNYKDKEQKDFKDRNLNDTRYIARLVLNYTKDYLDFLPLSDDENTKLNDTQKGSKVHVEAKSGMLTSALRHTWGFSTKDRNNHLHHAIDAVIIAYANNSIVKAFSDFKKEQESNSAELYAKKISELDYKNKRKFFEPFSGFRQKVLDKIDEIFVSKPERKKPSGALHEETFRKEEEFYQSYGGKEGVLKALELGKIRKVNGKIVKNGDMFRVDIFKHKKTNKFYAVPIYTMDFALKVLPNKAVARSKKGEIKDWILMDENYEFCFSLYKDSLILIQTKDMQEPEFVYYNAFTSSTVSLIVSKHDNKFETLSKNQKILFKNANEKEVIAKSIGIQNLKVFEKYIVSALGEVTKAEFRQREDFKK

SEQ ID NO: 372 - protein, 721 aa, Campylobacter jejuni
MFVALTRIINLLNNLKNTEGILYTKDDLNTLLNEVLKNGTLTYKQTKKLLGLSDDYEFKGEKGTYFIEFKKYKEFIKALGDHSLSQDDLNEIAKDITLIKDEIKLKKALAKYDLNQNQIDSLSKLEFKDHLNISFKALKLITPLMLEGKKYDEACNELNLKVAINEDKKDFLPAFNETYYKDEVTNPVVLRAIKEYRKVLNALLKKYGKVHKINIELAREVGKNYSQRAKIEKEQNENYKAKKDAELECEKLGLKINSKNILKLRLFKEQKEFCAYSGEKIKISDLQDEKMLEIDHIYPYSRSFDDSYMNKVLVFTKQNQEKLNQTPFEAFGNDSAKWQKIEVLAKNLPTKKQKRILDKNYKDKEQKDFKDRNLNDTRYIARLVLNYTKDYLDFLPLSDDENTKLNNTQKGSKVYVEAKSGMLTSALRHTWGFSTKDRNNHLHHAIDAVIIAYANNSIVKAFSDFKKEQESNSAELYAKKISELDYKNKRKFFEPFSGFRQKVLDKIDEIFVSKPERKKPSGALHEETFRKEEEFYQSYGGKEGVLKALELGKIRKVNGKIVKNGDMFRVDIFKHKKTNKFYAVPIYTMDFALKVLPNKAVARSKKGEIKDWILMDENYEFCFSLYKDSLILIQTKDMQEPEFVYYNAFTSSTVSLIVSKHDNKFETLSKNQKILFKNANEKEVIAKSIGIQNLKVFEKYIVSALGEVTKAEFRQREDFKK

SEQ ID NO: 373 - protein, 512 aa, Campylobacter jejuni
MHKINIELAREVGKNHSQRAKIEKEQNENYKAKKDAEIECEKLGLKINSKNILKLRLFKEQKEFCAYSGEKIKLSDLQDEKMLEIDHIYPYSRSFDDSYMNKVLVFTKQNQEKLNKTPFEAFGNDSTKWQKIEVLAKNLPEKKQKRILDKNYKDKEQKDFKDRNLNDTRYIARLVLNYTKDYLDFLPLSDDENTKLNDTQKGSKVHVEAKSGMLTSALRHTWGFSAKDRNNHLHHAIDAAIIAYANNSIVKAFSDFKKEQESNSVELYAKKISELDYKNKRKFFEPFSGFRQKVLDKIDEIFVSKPERKKPSGALHEETFRKEEEFYQSYGGKEGVLKALELGKIRKVNGKIVKNGDMFRVDIFKHKKTNKFYAVPIYTMDFALKVLPNKAVARSKKGEIKDWILMDENYEFCFSLYKDSLILIQTKDMQEPELVYFNAFTSSTVSLIVSKHDNKFETLSKNQKILFKNANEKEVIAKSIGIQNLKVFEKYIVSALGEVTKAEFRQREDFKK

SEQ ID NO: 374 - protein, 965 aa, Campylobacter jejuni
MKIIGFNLGIANIGWALRENDEIIDCGVRVFDIPENPKNGNSLALERRENKARMKIVKRKKARMLATKTFLKKELNVDLSKLFLIGSTQSIYELRAKALSSLISKEELSAIILHIAKHRGYDDSALKNENGTIIEALNKNKETMLKFKSVGEYFYKNFVQNKEVKKIRNTTEDYSNSVPRSLLKQELDLILDKQKELGLIKNADFKEKLFEIIFFKRPLKDFSNKIGNCIFFENEKRAAKNTISACEFVALGKVVNLLKSIEKDIGIVYEKDSINEIMSIILDKTSISYKKIRDILNLPQEINFKGLDYSKNNVENSKLVDLKKLNEFKKALGDGFANLDKDILDSIATDITLTKDTATLKEKLKNYNVLNAEQIEKLSELVFNDHINLSLKALKQIIPLMYEGKRYDEACELCNFTIAKNQEKSEYLPLFEKTRFAKDISSPVVIRAICEFRKLLNDIIRRYGSVHKIHLELTRDFGISFSDRKKIIKEIEQNEQSRIKALETIKELKLEETSKNIQIVRLFEDQKGICPYSGLKMDLNRLDELVIDYIRPYNRSLDDSYSNKVLTFKKLSDLKQGKTPFEAFGEDEKLWAEINERIKEYNGKKRFKIFDKFFKDKKPFDFTEQTLQDTRWLTKLVASYLNEYLSFLPISEDENTALGYGEKGSKQHVILSSGMITQMLRNFWYLGFKNHKDYKNNAMDAIIVAFTTNSIIFAFNNFKKELDLAKAEFYANKISESDYLLKRKFLPPFSGFKEQALEKVKNIFVSHSLKIKNKGTLHDLTPLKIKELKNTYGDLDLAVKLGKIRKYNDKYYANANGSLVRADLFVDKKNKFHAVSIYKADFSTKKLPNKTPATTSNGETKEGIEMNENYNFCMSLYKNTPISVKIKGMKEPIICYYHGFNTSGSKITYKKHDNNYHNLSEDEMVVFRKNDKESIAVGKILEIKKYSISPSGELSLIENEERKWF

SEQ ID NO: 375 - protein, 759 aa, Campylobacter jejuni
MLSVAFYKRALKDFSHLVGNCSFFTDEKRAPKNSPLAFMFVALTRIINLLNNLKNTEGILYTKDDLNALLNEVLKNGTLTYKQTKKLLGLSDDYEFKGEKGTYFIEFKKYKEFIKALGEHNLSQDDLNEIAKDITLIKDEIKLKKALAKYDLNQNQIDSLSKLEFKDHLNISFKALKLITPLMLEGKKYDEACNELNLKVAINEDKKDFLPAFNETYYKDEVTNPVVLRAIKEYRKVLNALLKKYGKVHKINIELAREVGKNHSQRAKIEKEQNENYKAKKDAELECEKLGLKINSKNILKLRLFKEQKEFCAYSGEKIKISDLQDEKMLEIDHIYPYSRSFDDSYMNKVLVFTKQNQEKLNKTPFEAFGNDSAKWQKIEVLAKNLPTKKQKRILDKNYKDKEQKDFKDRNLNDTRYIARLVLNYTKDYLDFLPLSDDENTKLNDTQKGSKVHVEAKSGMLTSALRHTWGFSTKDRNNHLHHAIDAVIIAYANNSIVKAFSDFKKEQESNSAELYAKKISELDYKNKRKFFESFSGFRQKVLDKIDEIFVSKPERKKPSGALHEETFRKEEEFYQSYGGKEGVLKALELGKIRKVNGKIVKNGDMFRVDIFKHKKTNKFYAVPIYTMDFALKVLPNKAVARSKKGEIKDWILMDENYEFCFSLYKDSLILIQTKDMQEPEFVYYNAFTSSTVSLIVSKHDNKFETLSKNQKILFKNANEKEVIAKSIGIQNLKVFEKYIVSALGEVTKAEFRQREDFKK

SEQ ID NO: 376 - protein, 984 aa, Campylobacter jejuni
MVRILAFDIGISSIGWAFSENDELKDCGVRIFTKVENPKTGESLALPRRLARSARKRLARRKARLNHLKHLIANEFKLNYEDYQSFDESLAKAYKGSLISPYELRFRALNELLSKQDFARVILHIAKRRGYDDIKNSDDKEKGAILKAIKQNEEKLANYQSVGEYLYKEYFQKFKENSKEFTNVRNKKESYERCIAQSFLKDELKLIFKKQREFGFSFSKKFEEEVLSVAFYKRALKDFSHLVGNCSFFTDEKRAPKNSPLAFMFVALTRIINLLNNLKNTEGILYTKDDLNALLNEVLKNGTLTYKQTKKLLGLSDDYEFKGEKGTYFIEFKKYKEFIKALGEHNLSQDDLNEIAKDITLIKDEIKLKKALAKYDLNQNQIDSLSKLEFKDHLNISFKALKLITPLMLEGKKYDEACNELNLKVAINEDKKDFLPAFNETYYKDEVTNPVVLRAIKEYRKVLNALLKKYGKVHKINIELAREVGKNHSQRAKIEKEQNENYKAKKDAELECEKLGLKINSKNILKLRLFKEQKEFCAYSGEKIKISDLQDEKMLEIDHIYPYSRSFDDSYMNKVLVFTKQNQEKLNKTPFEAFGNDSAKWQKIEVLAKNLPTKKQKRILDKNYKDKEQKDFKDRNLNDTRYIARLVLNYTKDYLDFLPLSDDENTKLNDTQKGSKVHVEAKSGMLTSALRHTWGFSTKDRNNHLHHAIDAVIIAYANNSIVKAFSDFKKEQESNSAELYAKKISELDYKNKRKFFEPFSGFRQKVLDKIDEIFVSKPERKKPSGALHEETFRKEEEFYQSYGGKEGVLKALELGKIRKVNGKIVKNGDMFRVDIFKHKKTNKFYAVPIYTMDFALKVLPNKAVARSKKGEIKDWILMDENYEFCFSLYKDSLILIQTKDMQEPEFVYYNAFTSSTVSLIVSKHDNKFETLSKNQKILFKNANEKEVIAKSIGIQNLKVFEKYIVSALGEVTKAEFRQREDFKK

SEQ ID NO: 377 - protein, 1003 aa, Campylobacter lari]
MRILGFDIGINSIGWAFVENDELKDCGVRIFTKAENPKNKESLALPRRNARSSRRRLKRRKARLIAIKRILAKELKLNYKDYVAADGELPKAYEGSLASVYELRYKALTQNLETKDLARVILHIAKHRGYMNKNEKKSNDAKKGKILSALKNNALKLENYQSVGEYFYKEFFQKYKKNTKNFIKIRNTKDNYNNCVLSSDLEKELKLILEKQKEFGYNYSEDFINEILKVAFFQRPLKDFSHLVGACTFFEEEKRACKNSYSAWEFVALTKIINEIKSLEKISGEIVPTQTINEVLNLILDKGSITYKKFRSCINLHESISFKSLKYDKENAENAKLIDFRKLVEFKKALGVHSLSRQELDQISTHITLIKDNVKLKTVLEKYNLSNEQINNLLEIEFNDYINLSFKALGMILPLMREGKRYDEACEIANLKPKTVDEKKDFLPAFCDSIFAHELSNPVVNRAISEYRKVLNALLKKYGKVHKIHLELARDVGLSKKAREKIEKEQKENQAVNAWALKECENIGLKASAKNILKLKLWKEQKEICIYSGNKISIEHLKDEKALEVDHIYPYSRSFDDSFINKVLVFTKENQEKLNKTPFEAFGKNIEKWSKIQTLAQNLPYKKKNKILDENFKDKQQEDFISRNLNDTRYIATLIAKYTKEYLNFLLLSENENANLKSGEKGSKIHVQTISGMLTSVLRHTWGFDKKDRNNHLHHALDAIIVAYSTNSIIKAFSDFRKNQELLKARFYAKELTSDNYKHQVKFFEPFKSFREKILSKIDEIFVSKPPRKRARRALHKDTFHSENKIIDKCSYNSKEGLQIALSCGRVRKIGTKYVENDTIVRVDIFKKQNKFYAIPIYAMDFALGILPNKIVITGKDKNNNPKQWQTIDESYEFCFSLYKNDLILLQKKNMQEPEFAYYNDFSISTSSICVEKHDNKFENLTSNQKLLFSNAKEGSVKVESLGIQNLKVFEKYIITPLGDKIKADFQPRENISLKTSKKYGLR

SEQ ID NO: 378 - protein, 372 aa, candidate division
DNESAINQIAYILTTQKADEGIRAELDSLPLSDKAKKAIVKIKPTNFKAFGHLSIKALQKITPHILEGMTYDKACEAAGYDFKKQSASLEQITNPVVKRAITQTLKVVRAIERKYGKPYFIKVETARDLAKNFKDRNAIKKENEENQGYNEDIKSIITNGYEASPKTKGGKQLLNHLKEFNVRLNKNADFNGQQIIKVKLYREQQGKCLYSGNPIDFETMLRDDNAYQVDHIVPFSRSNNDGITNKVLVFTEENQKKADRTPFEYFGTDERRWEKFVALVETTYKTRDVKTSDKATNAINYEYNGYAMKKKQNLLLQDYKNDSWNVRALNDTRYITRFIQNYLRQNVDFAEGEEKQRIIAPNGTTTAYLRKR

SEQ ID NO: 379 - protein, 1117 aa, Capnocytophaga ochracea
MKHILGLDLGSNSIGWAFVQQDFENKQGKIIATGSRIIPMDQGILGDFERGNTVSQTAERTTYRSMRRLRERHLLRRERLHRVLHLLGFLPPHYDAQIDFTKRYGKFIDNAEPKIAYNNGNFIFMNSFNEMVEDFKKHQPQLFYKKSNGEESRIPYDWTIYYLRKKALSQKITQQELAWLILHFNQKRGYYQLRGEEETENPNKEVAFHSLKVVDVEAEAPNKKGEIWYTIRLENGWIYRRTSKNPLDDWKGKTRDFIVTTDLNDDGTIKLDKEGKEKRSFRAPDENDWNLLKKKTEHDIDFSGKPVGTYIYDHLLQNPNQKIKGKLVRTIERKYYKDELKAILAKQIALQPELFTETLLADCIRELYRKNETQQQNLLSKDFLHLFVEDIIFYQRPLCSKKSTIANCTLEKRSYIDKETNERKDAPIKVCAKSNPYYQEFRVLQWLQNLRIYEIETDREVTAEFIETPQDYEALFNFLMSQKEIDNEGLLKYFLFAKNPQIKDKAAKSELKKWLTTYRWNYVYDAADNSSKKYPMNETGYELQRYLQKVEGLPANFLTFDITYQLWHLLYSVKDKVEFEKALKKFAKKKQLDKTSFVDSFKNFKPYPNEYGSFSEKAIKKLLPLMRFGNHWDFNRIDVSTQKRIDDLINGVANEDIRTIIREKAEKYQLNSETCFQDLPLWLAQYVVYNRHAEATDIEKWTSVSDLEAYLEDFKQHSLRNPIVEQVVTETLRVVRDIWQQYSGGQANFFDEIHIELGRELKKTAEERKQLSDKNQENENTNLRIKKLLAELKEDASIQNVRPYSLVQQELLKIYEEGVFSSTDEIEEDIQKIRKKVEPTPPEIQRYKLWLEQKYKSPYTGEVISLTKLFTEEYEIEHIIPQSRYYDDSLSNKVICESAVNKLKTNQLGLEFIQNHHGEKVRITANKEVTIFTEEQYKEFVKKHYANNSAKQQKLLLNEIPEKMVARQLNDTRYISKCISEILSKIVRSDEKDEGVNSKNIIPCTGKITTALKQDWGLNDVWNELILPRFERMNQLTQTQLFTSYNDRLQKNLPTVPIEYSQGFQKKRIDHRHHAMDALVIACATREHINYMNNQHALDKSKDKKEKQQSRIDLHPL

SEQ ID NO: 380 - protein, 303 aa, Capnocytophaga ochracea
MSFKQNLRVINKATNYYEKWEEKNGVLVKKKVKQEGTNWAIRKPLHKETVSGKIVLDRKIGKDKILTATRKAVDITFTEKIISSITDTGIQKILLNYLKYKGSPEVAFSAEGLEELNKNIAQYNDGKKHQPIYKVRIFEEGSKFPLGETGAKATKYVEAAKGTNLFFGVYQGKEKRTYATIPLNEVIERQKQGLPSVPERNEKGEPLLFSLSPNDLVYVPMEGEIAETIDFNNLSKEQKERIYKTVSFTGNQCFFVQEAVASPIVNKMEYSPLNKMERDILGIMIKEVCVKLKVDRLGNIIKA

SEQ ID NO: 381 - protein, 1471 aa, Capnocytophaga sp.
MCKYFYIKNFITFVLSKSIIPMKHILGLDLGSNSIGWAFVQQDFENKQGKIIATGSRIIPMDQGILGDFERGNTVSQTAERTTYRSTRRLRERHLLRRERLHRVLHILGFLPPHYDAQIDFTKRYGKFIDNAEPKIAYNNGNFIFMNSFNEMIEDFKKHQPQLFYKKSNGEESKIPYDWTIYYLRKKALSQKITQQELAWLILHFNQKRGYYQLRGEEETENPNKEVAFHSLKVVDVEAEAPNKKGEIWYTIRLENGWIYRRTSKIPLDDWKGKTRDFIVTTDLNDDGTIKVDKEGKEKRSFRAPDENDWNLLKKKTEHDIDFSGKTVGAYIYDHLLQNPNQKIKGKLVRTIERKYYKDELKAILAKQIALQPELFTETLLADCIRELYRKNETQQQNLLSKDFLHLFVEDIIFYQRPLRSKKSTIANCTLEKRSYIDKETNERKDAPIKVCAKSNPYYQEFRVLQWLQNLRIYEIETDREVTAEFIETPQDCEALFNFLMSQKEIDNKGLLKYFLFAKNPQIKDKAAKSELKKWLTTYRWNYVYDAADNSSKKYPMNETGYELQRYLQKVEGLPANFLTFDITYQLWHLLYSVKDKVEFEKALKKFAKKKQLDKTSFVDSFKNFKPYPNEYGSFSEKAIKKLLPLMRFGNHWDFNRIDVSTQKRIDDLINGVANEDIRTIIREKAEKYQLNSETCFQDLPLWLAQYVVYNRHAEATDIEKWTSVSDLEAYLEDFKQHSLRNPIVEQVVTETLRVVRDIWQQYGGGQANFFDEIHIELGRELKKTAEERKQLSDKNQENESTNLRIKKLLAELKEDASIQNVRPYSLVQQELLKIYEEGVFSATDEVEEDIQKIRKKAEPSKADLQRYKLWLEQKYKSPYTGEVISLTKLFTEEYEIEHIIPQSRYYDDSLSNKVICESAVNKLKTNQLGLEFIQNHHGEKVRITANKEVTIFTEEQYKEFVKKHYANNSAKQQKLLLNEIPEKMVARQLNDTRYISKYISEILSKIVRSDEKDEGVNSKNIIPCTGKITTALKQDWGLNDVWNKLILPRFERMNQLTQTQLFTSYNDRLQKNLPTVPIEYSQGFQKKRIDHRHHAMDALVIACATREHINYMNNQHALDKSKDKKEKQQSRIDLRTILCEKKNNNWQFKKPWSTFTQEAKEALEHIVVSFKQNLRVINKATNYYEKWEEKNGVLVKKKVKQEGTNWAIRKPLHKETVSGKIVLDRKIGKDKILTATRKAVDITFTEKIISSITDTGIQKILLNYLKYKGSPEVAFSTEGLEELNKNIAQYNNGKKHQPIYKVRIFEEGSKFPLGETGAKATKYVEAAKGTNLFFGVYQGKGKRTYATIPLNEVIERQKQGLPSVPERNEKGEPLLFSLSPNDLVYVPMEGEIAETIDFNNLSKEQKERIYKTVSFTGNQCFFVQEAVATPIVNKMEYSPLNKMERDILGTMIKEVCIKLKVDRLGNITKA

SEQ ID NO: 382 - protein, 1450 aa, Capnocytophaga sp.
MKHILGLDLGSNSIGWAFVQQDFENKQGKIIATGSRIIPMDQGILGDFERGNTVSQTAERTTYRNTRRLRERHLLRRERLHRVLHILGFLPPHYDSQIDFTKRYGKFIDNAEPKIAYNNGNFIFMNSFNEMIEDFKKYQPQLFYKKSNGEESKIPYDWTIYYLRKKALSQKITQQELAWLILHFNQKRGYYQLRGEEETENPNKEVAFHSLEVVDVEAEAPNKKGEIWYTIRLENGWIYRRTSKIPLDDWKGKTRDFIVTTDLNDDGTIKLDKEGKEKRSFRAPDENDWNLLKKKTEHDIDFSGKTVGAYIYDHLLQNPNQKIKGKLVRTIERKYYKDELKAILAKQIALQPELFTETLLADCIRELYRKNETQQQNLLSKDFLHLFVEDIIFYQRPLRSKKSTIANCTLEKRSYIDKETNERKDTPIKVCAKSNPYYQEFRVLQWLQNLRIYEIETDREVTAEFIETAQDNEALFNFLMSQKEIDNESLLKYFLFAKNPQIKDKVAKSELKKWLTTYRWNYVYDAADNSSKKYPMNETGYELQQYLQKVEGLPANFLTFDITYRLWHLLYSVKDKVEFEKALKKFAQEYQLDEASFVDSFKNFKPYPNEYGSFSEKAIKKLLPLMRFGNHWDFNRIDVSTQKRIDDLINGVANDEIRTIIREKAEKYQLNSETCFQGLPLWLAQYVVYNRHAEAADIEKWTSVNDLEAYLEDFKQHSLRNPIVEQVITETLRVVRDIWQRYGGGQANFFDEIHIELGRELKKTAEERKQLSNRNQENENTNLRIKKLLAELKEDASIQNVRPYSPVQQELLKIYEEGVFSATDEVEEDIQKIRKKAEPTTPEIQRYKLWLEQKYKSPYTGEVISLTKLFTEEYEIEHIIPQSRYYDDSLSNKVICESAVNKLKTNQLGLEFIQNHHGEKVRITANKEVTIFTEEQYKEFVKKHYANNSAKQQKLLLNEIPEKMVARQLNDTRYISKYISEILSKIVRSDEKDEGVNSKNIIPCTGKITTALKQDWGLNDVWNELILPRFERMNQLTQTQLFTSYNDRFQKNLPTVPIEYSQGFQKKRIDHRHHAMDALVIACATREHINYMNNQHALDKSKDKKEKQQSRIDLRTILCEKKNNNWQFKKPWSTFTQEAQEALEHIVVSFKQNLRVINKATNYYEKWEEKNGVLVKKKVKQEGTNWAIRKPLHKETVSGKIVLDRKIGKDKILTATRKSVDITFTEKIISSITDTGIQKILLNYLKYKGSPEVAFSAEGLEELNKNIAQYNDGKKHQPIYKVRIFEEGSKFPLGETGAKATKYVEAAKGTNLFFGVYQGKGKRTYATIPLNEVIERQKQGLPSVPERNEKGEPLLFSLSPNDLVYVPMEGEIAETIDFNNLSKEQKERIYKTVSFTGNQCFFVQEAVATPIVNKIEYSPLNKMERDILGTMIKEVCIKLKVDRLGNITKA

SEQ ID NO: 383 - protein, 1435 aa, Capnocytophaga sp.
MKNILGLDLGTTSIGFAHIVEDENKEKSEIKELGVRIVSLATDEQSDFEKGKSISTNANRTLKHGARLNLDRYQQRRKFLIDLLQKANLITSASILAENGKNTTHSTWQLRAKAVTERIEKEEFARVLLAINKKRGYKNSRKTKTEDEGQAIDGMAIAKCLYDENLTPGQLSLQLLQQNKKLLPDFYRSDLQKEFDLVWNLQKQFYPDILTDSFYKELQGKGKDATSKAFSKRYHFDTAENKGSKESVRLQAYQWRAEAISKQLSKEEVAYVLTEINNNLNNSSGYLGAISDRSKELYFNRQTVGQYLYAQLQENRHNSLKNKVFYRQDYLDEFERIWETQASFHKELTDELKKQIRDVVIFYQRKLKSQKGLVSFCEFESKEIEIEKDGKAITKSIGARVVPKSSPLFQEFKIWQILNNVTCKRKGIRKKKSSAKSTELDLFNEPSQSIFSLDMECKQLLFDELNLKGDLKSDKVLKLLGYSPQEWEINYNQLEGNRTQKSLYEAYLKIIEIEGYEVKDILQIKSTKDDWSLDESPLSASEIRERVKVIFQTLGICTKILYFDPLLPVKEFEQQYSYQLWHLLYSYESDDSTSGNETLYRILEKKYAFKREHATILANVALQDDYGSLSTKAIRKIYPYIKENQYSTACELAGYKHSKLSLTTEELEARELKNIIPLLKKNALRNPVVEKILNQMINVVNALIEKNSERDAEGKITKYFHFDEIRIELARELKKNAQERYEMTQNINKAKLEHQKISEKLQKQFGIKNPTKSDIIRYRLYQELEHNGYKELYTNTYIAPDVLFSKNIDIEHIVPKARVFDDSFSNKTLAFKEFNIKKGESTAFDYITSLNCEGELNQYLTRVENAYKTKSISLTKYKNLLKKASEIGDGFINRDLRDTQYIAKKAKEILFQVTKNVLSTSGSITDRLREDWGLVDVMKELNMPKYQSLGLTEVEERKDGNKVTVIKDWTKRNDHRHHAMDALTVAFTKPSYIQYLNHLNARKDENNKNYSVILAIEKKETIKVPINNGKNKRVFIEPILNFRQVAKKHLEEIFISHKAKNKVVTKNINKPAGTDKQQITLTPRGQLHKETIYGKYQYYVNKEEKVGVKFDERTITKVSNPLYREALLKRLQANDNDPKKAFAGKNALSKNPIYLDEAKTKTLPEKVNLTYLEEDFSIRKDISPDNFKDLKSIEKVIDQGVKRILIKRLQAYDNDPKKAFVDLEKNPIWLNKEKGIAIKRVTISGVSNAQPLHIGKDHLGKTTLNKEGKEVPVDYVSTGNNHHVAIYRDKEGNLQEQIVSFFEAVVRAQQGLPIIDKNYKQAEGWQFMFTMKQNEMFVFPNEATGFNPAEIDLLDPKNKKLISPNLFRVQTISIVKYGNSVVRDFKFRHHLETTLQDDKILQGITFQQIKSLEPLRNIVKVRINHLGDIVNIGEY

SEQ ID NO: 384 - protein, 1432 aa, Capnocytophaga sp.
MKNILGLDLGTTSIGFAHIVEDENKEKSEIKELGVRIVSLTTDEQSDFEKGKSITTNANRTLKHGARLNLDRYQQRRKYLIDLLHKANLITPSSILAENGKNTTHSTWQLRAKAVTERIEKEEFARILLAINKKRGYKSSRKAKTEDEGQAIDGMAIAKRLYDENLTPGQLSLQLLQQNKKLLPDFYRSDLQKEFDLVWNFQKQFYPDILTDIFYKELQGKGKDATSKAFSKRYHFDTAENKGSKESVRLQAYQWRAEAVSKQLSKEEVAYVLTEINNNLNNASGYLGAISDRSKELYFNRQTVGQYLYAQLQENRHNSLKNKVFYRQDYLDEFERIWETQALFHKELTDELKKQIRDVVIFYQRKPKSQKGLISFCEFESKEIEIEKDGKTITKNIGARVVPKSSPLFQEFKIWQILNNVICKRKGIRKKKISAKTTQLDLLNESSQTIFSLDMECKQLLFDELNLKGDLKSDKVLKLLGYSPQEWEINYNQLEGNRTQKALYEAYLKIVEMEAHDVKDILQIKSTKDDWSLDESPLSASEIRESVKAIFQALGICTKILYFDPLLPVKDFEEQDSYQLWHLLYSYESDDSTSGNETLYRILEKKYAFKREHARILANVALQDDYGSLSTKAIRKIYPNIKENQYSTACEMAGYKHSKLSLTTEELEARELKNIIPLLKKNALRNPVVEKILNQMINVVNALIEKNSERDAEGKITKYFHFDEIRIELARELKKNAQKRYEMTQNINKAKSEHQKISEILQKEFGIKNPTKSDIIRYRLYKELEHNGYKELYTNTYIAPDVLFSKNIDIEHIVPKARVFDDSFSNKTLAFKDFNIKKGESTAFDYITSLKNEEKLNQYLARVENAYKTKNISPAKYKNLLKKASEIGDGFINRDLRDTQYIAKKAKEILFQVTKNVLSTSGSITDRLREDWSLVDVMKELNMPKYQSLGLTEVEERKDGNKVTVIKDWTKRNDHRHHAMDALTVAFTKPSYIQYLNHLNARKDENNKNYSVILAIEKKETIKVPTNNGKNKRVFIEPIPNFRQVAKKHLEEIFISHKAKNKVVTKNTNKPAGTNKQQITLTPRGQLHKETIYGKYQYYVNKEEKVGVKFDKETIAKVSNPLYREALLKRLQANDNDPKKAFTGKNALSKNPIYLDEAKTKTLPEKVNLTYLEEDFSVRKKIVPKNPTSKEFVPNLKSIEKVVDEGVRNILIERLRVYNNDPEKAFVDLEKNPIWLNKEKGIAIKRVTISGVNNAQPLHIGKDHLGKTTLNKEGKEIPVDYVSTGNNHHVAIYRDKEGNLQEQIVSFFEAVVRTQQGLPIIDKTYKQEEGWQFLFTMKQNEMFVFPNEATGFNPAEIDLLDPKNKKQISPNLFRVQKIATKDYFFRHHLETNVETDNVLKNTTWKREGLSGLKDIVKVRINHLGDIVSIGEY

SEQ ID NO: 385 - protein, 1426 aa, Capnocytophaga sp.
MKNILGLDLGTTSIGFTHIVEDENKEKSEIKELGVRIVSLTTDEQSDFEKGKSISTNANRTLKHGARLNLDRYQQRRKFLIDLLQKANLITSSSILAENGKNTTHSTWQLRAKAVTERIEKEEFARVLLAINKKRGYKSSRKAKTEDEGQAIDGMAIAKRLYDENLTPGQLSLQLLQQNKKLLPDFYRSDLQKEFDLVWNFQKQFYPDILTDSFYKELQGKGKDATSKAFSKRYHFDTAENKGSRESVRLQAYQWRAEAISKQLSKEEVAYVLTEINNNLNNASGYLGAISDRSKELYFNRQTVGQYLYAQLQENKHNSLKNKVFYRQDYLDEFERIWETQASFHKELTEELKKQIRDVVIFYQRKLKSQKGLISFCEFESKEIEIEKDGKTITKSIGARVVPKSSPLFQEFKIWQILNNVTCKRKGIRKKKSSAKSTELDLFNEPSQTIFSLDMECKQLLFEELNLKGDLKSDKVLKLLGYSPQEWEINYNQLEGNRTQKALYEAYLKIVEMEAHDVKDILQIKSTKDDWALEESPLSASEIRERVKAIFQTLGICTKILYFDPLLPVKEFEEQDSYQLWHLLYSYESDDSTSGNETLYRILEKKYAFKREHATILANVTLQDDYGSLSTKAIRKIYPYIKENQYSTACEKAGYKHSKLSLTTEELEARELKNIIPLLKKNALRNPVVEKILNQMINVVNALIEKNSERDAEGKITKYFHFDEIRIELARELKKNAQERYEMTQNINKAKLEHQKISGILQKEFGIKNPTKSDITRYRLYQELAHNGYNDLYTNTYIPKELLFSKNIDIEHIVSKARVFDDSFSNKTLAFREFNIKKGESTAFDYITSLNNEEELNQYLNRVENAYKTKNISPAKYKNLLKKASEIGDGFINRDLRDTQYIAKKAKEILFQVTKNVLSTSGSITDRLREDWGLVDVMKELNMPKYQSLGLTEVEERKEGNKVTVIKNWTKRNDHRHHAMDALTVAFTKPSYIQYLNHLNARKDKNNKNYSVILAIEEKETIKVPTNNGKNKRVFIEPIPNFRQVAKKHLEEIFISHKAKNKVVTKNTNKPAGTDKQQITLTPRGQLHKETVYGKYQYYVNKEEKIGVKFDKETIAKVSNPVYREALLKRLQANDNDPKKAFAGKNALSKNPIYLDEAKTKTLTEKVNLTYLEEDFSIRKDISPDNFKDLKSIEKVIDQGVKRILIKRLQDYDNDPKKAFVDLEKNPIWLNKEKGIAIKRVTISGVNNAQPLHIGKDHLGKTTLNKEGKEIPVDYVSTGNNHHVAIYRDKEGNLQEQIVSFFEAVVGAQQGLPIVDKTYKQAEGWQFLFTMKQNEMFVFPNEATGFNPAEIDLLDPKNKKQISPNLFRVQKIATKDYFFRHHLETNVDTDNVLKNTTWKREGLSGLKDIVKVRINHLGDIVSIGEY

SEQ ID NO: 386 - protein, 1450 aa, Capnocytophaga sp.
MKRILGLDLGSNSIGWAFVEQDFENKQGKIIATGSRIIPMDQGILGDFEKGNTVSQTAERTTYRSMRRLRERHLLRRERLHRVLHILGFLPPHYDAQIDFTKRYGKFIDNAEPKIAYNNGNFIFMNSFNEMIEDFKKYQPQLFYKKSNGEESKIPYDWTIYYLRKKVLSQKITQQELAWLILHFNQKRGYYQLRGEEETENPNKEVAFHSLKVVDVEAEAPNKKGEIWYTIRLENGWIYRRTSKIPLDDWKGKTRDFIVTTDLNDDGTIKVDKEGKEKRSFRAPDENDWNLLKKKTEHDIDFSGKTVGAYIYDHLLQNPNQKIKGKLVRTIERKYYKDELKAILAKQIALQPELFTETLLADCIRELYRKNETQQQNLLSKDFLHLFVEDIIFYQRPLRSKKSTIANCTLEKRSYIDKETNERKDTFIKVCAKSNPYYQEFRVLQWLQNLRIYEIETDREVTAEFIETAEDYEALFNFLMSQKEIDNEGLLKYFLFAKNPQIKDKVAKSELKKWLTTYRWNYVYDAADNSSKKYPMNETGYDLQRYLQKVEGLPANFLTFDITYRLWHLLYSVKDKVEFEKALKKFAQEYQLDEASFVDSFKNFKPYPNEYGSFSEKAIKKLLPLMRFGNHWDFNRIDVSTQKRIDDLINGVANDEIRTIIREKAEKYQLNSESCFQGLPLWLAQYVVYNRHAEATDIEKWTSVSDLETYLEDFKQHSLRNPIVEQVVTETLRVVRDIWQQYGGGQANFFDEIHIELGRELKKTAEERKQLSNRNQENENTNLRIKKLLAELKEDASIQNVRPYSPVQQELLKIYEEGVFSSTDQVEEDIQKIRKKAEPTTPEIQRYKLWLEQKYKSPYTGEVISLTKLFTEEYEIEHIIPQSRYYDDSLSNKVICESAVNKLKTNQLGLEFIQNHHGEKVRITGNKEVTIFTEEQYKEFVKKHYANNSAKQQKLLLNEIPEKMVARQLNDTRYISKYISEILSKIVRSDEKDEGVNSKNVIPCTGKITTALKQDWGLNDVWNELILPRFERMNQLTQTQLFTSYNDRFQKNLPTVPIEYSQGFQKKRIDHRHHAMDALVIACATREHINYMNNQHALDKNKDKKEKQQSRIDLRTILCEKKNNNWQFKKPWSTFTQETKEALEHIVVSFKQNLRVINKATNYYEKWEEKNGVLVKKKVKQEGTNWAIRKPLHKETVSGKIVLDRKIGKDKILTATRKEVDITFTEKIISSITDTGIQKILLNYLNYKGSPEVAFSAEGLEELNKNIAQYNDGKKHQPIYKVRIFEEGSKFPLGETGAKATKFVEAAKGTNLFFGVYQGKEKRSYATIPLNEVIERQKQGLPSVPERNEKGEPLLFSLSPNDLVYVPMEGEIAETIDFNNLSKEQKERIYKTVSFTGNQCFFVQEAVATPIVNKMEYSPLNKMERDILGTMIKEVCIKLKVDRLGNITKA

SEQ ID NO: 387 - protein, 1437 aa, Capnocytophaga sp.
MKYIKYILGLDIGSNSIGWALIQLDLLQKTKRIIATGSRIIPMDQKVLSDFGKGITISPTAQRTSYRNARHCRERHLLRRERLHRVLHILGFLPTHYDKQIDFSKRYGKFVDNTEPKIAYNERKFLFMDSFQEMLADFKIHQPDLFYTKKNGEESKIPYDWTIYYLRKKALSRKISKEELAWIILNFNQKRGYYQLREEEEENKENDFEIISSKIISVIKKDKDKKYNKYWYDIILENGLVYQAAFYNDFVYNWINQDREFIIERISLKNGTEKVKLSYLPTFDEIDKMDKKEQDKYYKKIKIKTENSIGNKTVGCYIYDHILQNPNEKIKGKLVRTIERKYYKEELKAILEKQVALQPELFTDQLFADCIRELYSKNEAQQRNLAARDFVHLFVEDIIFYQRSLRRQKSTLANCSLESRSYIDKDSHTRKEAPLKVCPKSNPYYQEFRVLQWLQNLKIYEIDTDQEVTHEFIKTLEDKQQFFDFLMNQKEIDCEELLKYFLNQTYPNAREKALKSELKKWKDTYRWNYVYDIGEKSSKKYPMNETRYELKRHLEKVANLPDDFLSSEVEYLLWHLIYSVKDKVAYEKGLKTFAQKHHLDKDSFVESFKKFKPYPSEYGSFSEKAIRKLLPLMRFGSYWDFNHIDKNTQKRIEDLITGVENEEIRTILREKAEKYQLEKETDFQDLPLWLAQYIVYNRHAEASSLEKWTSVNDLETYLNEFKQYSLRNPIVEQVVMETLRVVRDIWQQYGQGQASFFDEIHIELGRELKKTAKEREKLSKQNQKNEDINLSIKEKLKELEKYNTRAYSITHQEKYKLWLEQKHISPYTGQIISPENLFTDNYEIEHIIPQSRFFDDSLSNKVVCESIVNKAPYKDRQLGLEFIKNQGGRIVKELSTENKTIKIFTEEQYRTFIKEHYSNNPEKTKKLLLEEIPEKMVARQMNDTCYISKFISEILSKIVRSDEQDEGVHSKNVILCTGKITSALKQDWGVNDVWNDLILPRFERMNDLTQSTLFTTYNEKYQKYLPTVPMEYSNGFQKKRIDHRHHAMDAIIIACATREHINYINNQHALEKGKDKKEKQKEHDKLREKLCIKKDNKGSEENYSWIFKKPWDTFTQEVQAALEGIVVSFKQNLRVINKATNYYERWVEENGKYIKKMVKQEGTNWAIRKPLHEETISGKIYLDREEITKNDILTATRKTVDSSFDEKRIKKITDTGIQKILLNYLKYKGSPEIAFSPEGLEELNKNLSIYNDGKPHKPIYKVRIYEKGSGRFALGEKGRKYKKYVQGAPNLYFGIYQGANKRSFATIPLNEVIERQKQGRPSIPEYNEKGDPLLFSLSPNDLVYVPVEGEIIEDIDFQNLSKEQKERIYNVNDFSSTCYFTPNRIAKAIFPKEVDLQRKGDKLPGSYDTKTASLEGIQIKEVCIKLKIDRLGNISKA

SEQ ID NO: 388 - protein, 1140 aa, Catellicoccus marimammalium
MKNMTKVNVGLDVGISSAGWSVINAETNQILESGVRLFSGSDADENVNRRNQRQGRRLFRRRKLRIQEAKKYLENVFQLKDIEPKDEWNPYEIRVRALNEKVSKEELSIALLNIVKHRGISYELEDVTDEEGTNTQSFQSGLDYNRRLLKTKTVGEIQYDRLQKYGQVRGQIQTEDGLLINIFPTKNYVEEVERILETQKKYHPEIDDVFIEKIISFVTRKREYFVGPGNEKSRTDYGIYRENGETLDNLFEILIGKDKFYPEEYRAAGSSYTAQIFNLLNDLNNLRIPTTEDHHLTKAQKEEIITELKNTSRLSGGMLKLISKVTKAPKEEISGYRKDEKDKPDLHSLAYYRKQKNMLEKEGIQIADFSEELLDELATMMTLNTEPGEIRKQLNKITNQYDILTPEVIEVLVKNHTAFVATSNHKWHRFSLKLMKEFIPELLETSKEQSTILCERGFIQNRASYLDENHHFNYAELRENLYNPVVRKSTCEMLKVFTAIQEKYPNIQNVIVELPRETNEDEQKRKIKKINDNNAKRKKEILKEAQAQSGLSEEALEEKLLKTKGLYLKLMLWYEQEGKCVYSGQEIPLSDLLQNKGGYEVDHIIPISISFDDRLCNKVLVRQQLNSQKSNQTPFEYMTTHTDGHLSFHELKELVGKNKRFSKEKRELLLAEIYSNDIETRKRFINRNLVDTSYTARIVLNALQQYKKENQLSMNVSVVRGAMTNILRKKVKLDKTRETFHHHAIDASLMAVIPNIEFFKERKEWLPKSANEEVVEVEVSEEETMPEKEFKVKMRLPESFIQDVQILQRNSFAKEEVSGPQTRERNLKIKFSHQVDQKMNRKVADDTIYGTRQAQLGKDKKEETYVIGKIKDIYNYDEYVRFKKRYDKNKESFLMYHHDPQTFEKLEEILAQYPEYIEDEKGKKKKVSPFALYREENGPVTKYAKKNNGPVIKQLKYYDSKLNRKIDISHKYSTKNRQVVLQSLKPYRTDVYRNQDTGEYTLVGIDQNDGKFVNGHYGIPKSRYEEIKANNKLSEHDEFVFSLYKNSMVKVIDENGESIVVRYLSRSMPNRKNNAEIKPVEKYQFEDGEVVPVYGKCRKQMQTVFVKKGWTLLKGNTDILGNTYFVEKESENPKKMIDDK

SEQ ID NO: 389 - protein, 1419 aa, Chryseobacterium sp.
MMIKNILGLDLGTNSIGWALIKQNFENKYGEILGMGSRIIPMSQDVLGEFGKGNSVSQTAARTGYRGVRRLRERFLLRRERLHRVLNVLNFLPEHYASQIDFEKRFGKFKYETEPKLAYNNDGFFFKNSFDEMLGDFKDHQFHLLENGRKVPYDWTIYYLRKKALSQKIEKEELAWILLNFNQKRGYYQLRGEDFEEEKDRVFVRLKVDRVVDSGENIKGKILYDVYFENGWKYEKQIVKTEDWIGRTKEFIVTESILKNGDTKRTFKAVDSEKDWIAIKTKTEQEIDKSHKTVGAYIYEALLQNPKQKIKGKLVRTIERKFYREELKKILERQKEFHPELQSDDLYNDCIRELYRNNEAHQITLSKKDFVHLLLNDLIFYQRPLRSQKSSVSNCTLEFRKYKDENGVEHAQYLKTIPKSNPYYQEFRVWQWMFNLNIYRKDDDTNVTKEFLSSTEDYETLFEFLNNRKEVDQKALLRHFKLNEKTHRWNYVEDKKYPCNETKTMISTRLEKVENYPSDFLTREMEQNIWHIIYSVNDKIEYEKALKSFAHKNNLDENSFFEAFKKFPPFKSEYGSFSEKAIKKLLPLLRLGKYWNWESIDRKSQGRIEKIITGEFDGNIKDKVREKAIHLTAENDFQGLQLWLAQYIVYGRHSEASMIGKWNSADDLEEFLKGFKQHSLRNPIVEQVITETLRVVKDIWLKYGNGAKDFFSEIHIELGREMKQTKDERVDATKRITENENTNLRIKALLAEMMNDNSVENIRPYSPMQQEILKIYEDGILKSDIEIDDDILKISKTAQPSSSDLKRYKLWLEQRYKSPYTGQIIPLNKLFTSEYEIEHIIPQSRYFDDSFSNKIICESAVNKLKDNYIGLGFIKQFGGMIVECGFGKSVEIFKAEEYEDFVKKHYANNRSKRNKLLLEEIPEKMIDRQLNDTRHISKYISGVLSNIVRQEDGTDEGVNSKNIVPGNGKITTQLKQDWGLNDVWNELILPRFERMNQLTNSTDFTSWNKNHQKFLPTVPIEFSKGFSKKRIDHRHHAMDALVIACATKDHINLLNNQSAKSDTKRYDLKRKLMKFERVVYSHSKTGEKIEKEVPKQFLKPWDNFTVDAKNKMETIIVSFKQNLRVINKATNHYEKWIEKDGIKRKELIKQEGTNWAIRKPMHKETVSGKVDLPGIKIPKGKILTATRKSLDTSFDLKTINSITDTGIQKILKNYLEFKGSSELAFSPEGIEDMNKNIEKFNDGKPHQSINKVRIFELGSKFSVGQTGNKKDKYVEAAKGTNLFFAVYEDKNGKRSYETIPLNEVIERQKQGLDSVSFKNKEDFLLCPNDLVYVPSEDELENIYNIDFKNLTTEKTGNIYKVVSFSGNQIFFIRQDIAISIVNKAEFSTLNKMERAIDGSMIKENCIKLKIDRLGNIAKI

SEQ ID NO: 390 - protein, 1065 aa, Clostridium perfringens
MNKDINYALGLDIGITSVGWAVINLDLNRIEDLGVRIFNAAENPKDGSSLALPRRLARGRRRLLRRKAYRVERVRKLIVKNNILTKEELEGLFKNKEVIDVWEARVKGLDYKLSREEWAKILINFCKRRGFKSNRKNETKDKEAGQILSSISYNIEKMKETNSRTIGEYIYNEVKNSDDSYAPLRNKFGEYKMCVSRDVLREEIHTLFEKQRELGNNFASDEIEDKYFEIFNSQRPFSNFEDLEKLVGFCTFERKKHKRAPKHCISSEEFTLYEGINKLSIIKDGEKRKLSEEERTLVVNEAFNKKEIKYTTLRKLLGLSEDELFSTLTYSIDKDISKTENTKFVSLKGYHEIKRAIEKGVSKKAWQDIENNRNLLNDIAYVLTLGKTDDEIEKQLRLRNVPEELFESLLDMSFSKFNNLSIYALEKILPFMKEGYQYNEACEKAGYNFKAIYEGVRTKKLPVIEIDEIVNPVVNRALAQTRKVINSVIDKYGSPVRINIELARDLAKNFKDRKLIEKEQKENRANLDKIRENLRELMDKEPTAVEVLKYRLWEQQRGECAYTQSQIALERLFSPGYCEIDHIIPFSRSFDDSLSNKILVLGSENQRKGNKIPYEYFGEDSERWNSFEIWVKGSYLNYKKKANLLKKKFTEEEQRDWKARNLQDTKYICRYISNFVNNRLEFKESENKQKVITVNGRATAYLRSRWGLNKVREDGDKHHALDAAVVGVTTQGMVQKISKYSKAHELYTVRKNDEFVDVETGECVDVDEYKEIRKDILPRPWRGFSEELKLRLSDNPLEELKKLPIETYNEEFIKENVKPIFVSRVPFRKISGKLFKETIYSERAFKDGYFVSKKSLVDLKRGDLDNFYNYECDKKLYDAISERMKEFNYNGKKAFESPFRKPTKSGKEGPVVRSVKIKSAAPFKDGIPMNEGLVAKEGMVRIDIYEKEGKYFVVPVYRYQLAKGIVPKRAAIAGKSELKWPIMDQTYNFKFSIFKNDLIEIKYAKKDGYFGYYDGFDRHTASLVIENHDNSDRYRGIGVKTGVVEFNKYEVDVLGNYHKVNLGGN

SEQ ID NO: 391 - protein, 1099 aa, Corynebacterium accolens
MSLSYRVGIDVGTYSLGCTAIEVDDNDQPVNILSSVSLIHDSGLDPDQQKRAVTRLASSGVARRTRRLYRRRRRRMINLEKFLTSQGWETRPFEHYSDPYLPWNARVALVNGYISDDAQRGMYLSIAFRHIANHRGWRNPYWKVSSLYSPDKPSDAFEQIRKELEESTGHKIPETVTVGQLISFAQFGKDRLRGGGKKKDEKKPQEQVNQAVISARLHQIDHAREINEICRVQKIDDALRKQILDLVFAAESPKGAQIGRVGKDPLQPKLPRALKASDAFQQYRIVALAGNLRIYRDGVSTPLDRDEKLIVFNYLINLSHKEEPSWLKVAEVLNIDRGQLHGTATMTDDGERAGAAPPVHDTNRTILGCKIKPLVHWWEGANDDERAAMLKALSNSEVEDFDSPAGAQTQAFFANLDESEQEKLDSLHLPIGRAAYSEDTLMRLTSRMLDENLDLYEARLAEFDIPKDWAPPAPRIGEPVGNPAVDRVLKGVARWLEAAADEWGAPKSVVIEHVRDGFISKSKANEIDRANNARHKRNRELFKQMQENLGIDGKLRSSDLWRYQSVQRQNCQCAYCGSPITYTTCEMDHIVPRAGEGSTNTRDNLVATCHRCNLAKKNIPFAVWAAQTNIPGVSVKEALDRTRHWSEDSGMTSKDFKKFRKNVCDRLKRTVVDEPLDARSMESVAWMANELRGRVAQRFQEENTVVNVYRGELTAEARRAAGISDKLRFIDGTGKSRLDRRHHAVDAAVVAFTQNYVAETLAIRSNKKREAQLLQAAEQWKEFTGSDAEHRAAWNAWLPKMQKLAVLLQKALDEDRIAVTSNLRLRLGNGRAHEDSIGELKTIRVGDAISVTDIDRASSEALWCALTREPDFDENNGLPENPDRRIRIHGTWYDAEDDIEVFPVGAGAIKVRGGYAELSRFHHARIYKIPGKKAPVYCMLRVYNADLIRHRHEDLFSVEIKPQTMSVRQAEPKLRKALAENTAEYLGWLVTDDELVIDTSNFNTGQIAEMQSELGQVRRWRLDGFYSPSTLRLRPLQMSAEGLREDTSIGAKKIIDRPGWLPAINKLFGEGHVTVVRRDALGRARLTSNAHLPISWKAE

SEQ ID NO: 392 - protein, 1084 aa, Corynebacterium diphtheriae
MKYHVGIDVGTFSVGLAAIEVDDAGMPIKTLSLVSHIHDSGLDPDEIKSAVTRLASSGIARRTRRLYRRKRRRLQQLDKFIQRQGWPVIELEDYSDPLYPWKVRAELAASYIADEKERGEKLSVALRHIARHRGWRNPYAKVSSLYLPDGPSDAFKAIREEIKRASGQPVPETATVGQMVTLCELGTLKLRGEGGVLSARLQQSDHAREIQEICRMQEIGQELYRKIIDVVFAAESPKGSASSRVGKDPLQPGKNRALKASDAFQRYRIAALIGNLRVWVDGEKRILSVEEKNLVFDHLVNLTPKKEPEWVTIAEILGIDRGQLIGTATMTDDGERAGARPPTHDTNRSIVNSRIAPLVDWWKTASALEQHAMVKALSNAEVDDFDSPERAKVQAFFADLDDDVHAKLDSLHLPVGRAAYSEDTLVRLTRRMLSDGVDLYTARLQEFGIEPSWTPPTPRIGEPVGNPAVDRVLKTVSRWLESATKTWGAPERVIIEHVREGFVTEKRAREMDGDMRRRAARNAKLFQEMQEKLNVQGKPSRADLWRYQSVQRQNCQCAYCGSPITFSNSEMDHIVPRAGQGSTNTRENLVAVCHRCNQSKGNTPFAIWAKNTSIEGVSVKEAVERTRHWVTDTGMRSTDFKKFTKAVVERFQRATMDEEIDARSMESVAWMANELRSRVAQHFASHGTTVRVYRGSLTAEARRASGISGKLEFLDGVGKSRLDRRHHAIDAAVIAFTSDYVAETLAVRSNLKQSQAHRQEAPQWREFTGKDAEHRATWRVWCQKMEKLSALLTEDLRDDRVVVMSNVRLRLGNGSAHEETIGKLSKVKLGSQLSVSDIDKASSEALWCALTREPDFDPKDGLPANPERHIRVNGTHVYAGDNIGLFPVSAGSIALRGGYAELGSSFHHARVYKITSGKKPAFAMLRVYTIDLLPYRNQDLFSVELKPQTMSMRQAEKKLRDALATGNAEYLGWLVVDDELVVDTSKIATDQVKAVEAELGTIRRWRVDGFFGDTRLRLRPLQMSKEGIKKESAPELSKIIDRPGWLPAVNKLFSEGNVTVVRRDSLGRVRLESTAHLPVTWKVQ

SEQ ID NO: 393 - protein, 1084 aa, Corynebacterium diphtheriae
MKYHVGIDVGTFSVGLAAIEVDDAGMPIKTLSLVSHIHDSGLDPDEIKSAVTRLASSGIARRTRRLYRRKRRRLQQLDKFIQRQGWPVIELEDYSDPLYPWKVRAELAASYIADEKERGEKLSVALRHIARHRGWRNPYAKVSSLYLPDGPSDAFKAIREEIKRASGQPVPETATVGQMVTLCELGTLKLRGEGGVLSARLQQSDHAREIQEICRMQEIGQELYRKIIDVVFAAESPKGSASSRVGKDPLQPGKNRALKASDAFQRYRIAALIGNLRVRVDGEKRILSVEEKNLVFDHLVNLAPKKEPEWVTIAEILGIDRGQLIGTATMTDDGERAGARPPTHDTNRSIVNSRIAPLVDWWKTASALEQHAMVKALSNAEVDDFDSPEGAKVQAFFADLDDDVHAKLDSLHLPVGRAAYSEDTLVRLTRRMLADGVDLYTARLQEFGIEPSWTPPAPRIGEPVGNPAVDRVLKTVSRWLESATKTWGAPERVIIEHVREGFVTEKRAREMDGDMQRRAARNAKLFQEMQEKLNVQGKPSRADLWRYQSVQRQNCQCAYCGSPITFSNSEMDHIVPRAGQGSTNTRENLVAVCHRCNQSKGNTPFAIWAKNTSIEGVSVKEAVERTRHWVTDTGMRSPDFKKFTKAVVERFQRATMDEEIDARSMESVAWMANELRSRVAQHFASHGTTVRVYRGSLTAEARRASGISGKLKFFDGVGKSRLDRRHHAIDAAVIAFTSDYVAETLAVRSNLKQSQAHRQEAPQWREFTGKDAEHRAAWRVWCQKMEKLSALLTEDLRDDRVVVMSNVRLRLGNGSAHKETIGKLSKVKLGSQLSVSDIDKASSEALWCALTREPDFDPKEGLPANPERHIRVNGTHVYAGDNIGLFPVSAGSIALRGGYAELGSSFHHARVYKITSGKKPAFAMLRVYTIDLLPYRNQDLFSVELKPQTMSMRQAEKKLRDALATGNAEYLGWLVVDDELVVDTSKIATDQVKAVEAELGTIRRWRVDGFFSPSKLRLRPLQMSKEGIKKESAPELSKIIDRPGWLPAVNKLFSDGNVTVVRRDSLGRVRLESTAHLPVTWKVQ

SEQ ID NO: 394 - protein, 1084 aa, Corynebacterium diphtheriae
MKYHVGIDVGTFSVGLAAIEVDDAGMPIKTLSLVSHIHDSGLDPDKIKSAVTRLASSGIARRTRRLYRRKRRRLQQLDKFIQRQGWPVIELEDYSDPLYPWKVRAELAASYIADEKERGEKLSVALRHIARHRGWRNPYAKVSSLYLPDEPSDAFKAIREEIKRASGQPVPETATVGQMVTLCELGTLKLRGEGGVLSARLQQSDHAREIQEICRMQEIGQELYRKIIDVVFAAESPKGSASSRVGKDPLQPGKNRALKASDAFQRYRIAALIGNLRVRVDGEKRILSVEEKNLVFDHLVNLAPKKEPEWVTIAEILGIDRGQLIGTATMTDDGERAGARPPTHDTNRSIVNSRIAPLVDWWKTASALEQHAMVKALSNAEVDDFDSPEGAKVQAFFADLDDDVHAKLDSLHLPVGRAAYSEDTLVRLTRRMLADGVDLYTARLQEFGIEPSWTPPAPRIGEPVGNPAVDRVLKTVSRWLKSATKTWGAPERVIIEHVREGFVTEKRAREMDGDMRRRAARNAKLFQEMQEKLNVQGKPSRADLWRYQSVQRQNCQCAYCGSPITFSNSEMDHIVPRAGQGSTNTRENLVAVCHRCNQSKGNTPFAIWAKNTSIEGVSVKEAVERTRHWVTDTGMRSTDFKKFTKAVVERFQRATMDEEIDARSMESVAWMANELRSRVAQHFASHGTTVRVYRGSLTAEARRASGISGKLEFLDGVGKSRLDRRHHAIDAAVIAFTSDYVAETLAVRSNLKQSQAHRQEAPQWREFTGKDAEHRAAWRVWCQKMEKLSALLTEDLRDDRVVVMSNVRLRLGNGSAHEETIGKLSKVKLGSQLSVSDIDKASSEALWCALTREPDFDPKDGLPANPERHIRVNGTHVYAGDNIGLFPVSAGSIALRGGYAELGSSFHHARVYKITSGKKPAFAMLRVYTIDLLPYRNQDLFSVELKPQTMSMRQAEKKLRDALATGNAEYLGWLVVDDELVVDTSKIATDQVKAVEAELGTIRRWRVDGFFGDTRLRLRPLQMSKEGIKKESAPELSKIIDRPGWLPAVNKLFSEGNVTVVRRDSLGRVRLESTAHLPVTWKVQ

SEQ ID NO: 395 - protein, 1084 aa, Corynebacterium diphtheriae
MKYHVGIDVGTFSVGLAAIEVDDAGMPIKTLSLVSHIHDSGLDPDKIKSAVTRLASSGIARRTRRLYRRKRRRLQQLDKFIQRQGWPVIELEDYSDPLYPWKVRAELAASYIADEKERGEKLSVALRHIARHRGWRNPYAKVSSLYLPDEPSDAFKAIREEIKRASGQPVPETATVGQMVTLCELGTLKLRGEGGVLSARLQQSDHAREIQEICRMQEIGQELYRKIIDVVFAAESPKGSASSRVGKDPLQPGKNRALKASDAFQRYRIAALIGNLRVRVDGEKRILSVEEKNLVFDHLVNLAPKKEPEWVTIAEILGIDRGQLIGTATMTDDGERAGARPPTHDTNRSIVNSRIAPLVDWWKTASALEQHAMVKALSNAEVDDFDSPEGAKVQAFFADLDDDVHAKLDSLHLPVGRAAYSEDTLVRLTRRMLADGVDLYTARLQEFGIEPSWTPPAPRIGEPVGNPAVDRVLKTVSRWLESATKTWGAPERVIIEHVREGFVTEKRAREMDGDMRRRAARNAKLFQEMQEKLNVQGKPSRADLWRYQSVQRQNCQCAYCGSPITFSNSEMDHIVPRAGQGSTNTRENLVAVCHRCNQSKGNTPFAIWAKNTSIEGVSVKEAVERTRHWVTDTGMRSTDFKKFTKAVVERFQRATMDEEIDARSMESVAWMANELRSRVAQHFASHGTTVRVYRGSLTAEARRASGISGKLEFLDGVGKSRLDRRHHAIDAAVIAFTSDYVAETLAVRSNLKQSQAHRQEAPQWREFTGKDAEHRAAWRVWCQKMEKLSALLTEDLRDDRVVVMSNVRLRLGNGSAHEETIGKLSKVKLGSQLSVSDIDKASSEALWCALTREPDFDPKDGLPANPERHIRVNGTHVYAGDNIGLFPVSAGSIALRGGYAELGSSFHHARVYKITSGKKPAFAMLRVYTIDLLPYRNQDLFSVELKPQTMSMRQAEKKLRDALATGNAEYLGWLVVDDELVVDTSKIATDQVKAVEAELGTIRRWRVDGFFGDTRLRLRPLQMSKEGIKKESAPELSKIIDRPGWLPAVNKLFSEGNVTVVRRDSLGRVRLESTAHLPVTWKVQ

SEQ ID NO: 396 - protein, 1084 aa, Corynebacterium diphtheriae
MKYHVGIDVGTFSVGLAAIEVDDAGMPIKTLSLVSHIHDSGLDPDKMKSAVTRLASSGIARRTRRLYRRKRRRLQQLDKFIQRQGWPVIELEDYSDPLYPWKVRAELAASYIADEKERGEKLSVALRHIARHRGWRNPYAKVSSLYLPDEPSDAFKSIREEIKRASGQPVPETATVGQMVTLCELGTLKLRGEGGVLSARLQQSDHAREIQEICRMQEIGQELYRKIIDVVFAAESPKGSASSRVGKDPLQPGKNRALKASDSFQRYRIAALISNLRVRVDGEKRILSVEEKNLVFDHLVNLAPKKEPEWVTIAEILGIDRGQLIGTATMTDDGERAGARPPTHDTNRSIVNSRIAPLVDWWKTASALEQHAMVKALSNAEVDDFDSPEGAKVQAFFADLDDDVHAKLDSLHLPVGRAAYSEDTLVRLTRRMLADGVDLYTARLQEFGIEPSWTPPAPRIGEPVGNPAVDRVLKTVSRWLESATKTWGAPERVIIEHVRDGFVTEKRAREMDGDMRRRAARNAKLFQEMQEKLNVQGKPSRADLWRYQSVQRQNCQCAYCGSPITFSNSEMDHIVPRAGQGSTNTRENLVAVCHRCNQSKGNTPFAIWAKNTSIEGVSVKEAVERTRHWVTDTGMRSTDFKKFTKAVVERFQRATMDEEIDARSMESVAWMANELRSRVAQHFASHGTTVRVYRGSLTAEARRASGISGKLEFLDGVGKSRLDRRHHAIDAAVIAFTSDYVAETLAVRSNLKQSQAHRQEAPQWREFTGKDAEHRAAWRVWCQKMEKLSALLTEDLRDDRVVVMSNVRLRLGNGSAHEETIGKLSKVKLGSQLSVSDIDKASSEALWCALTREPDFDPKDGLPANPERHIRVNGTHVYAGDNIGLFPVSAGSIALRGGYAELGSSFHHARVYKITSGKKPAFAMLRVYTIDLLPYRNQDLFSVELKPQTMSMRQAEKKLRDALATGNAEYLGWLVVDDELVVDTSKIATDQVKAVEAELGTIRRWRVDGFFGDTRLRLRPLQMSKEGIKKELAPELSKIIDRPGWLPAVNKLFSEGNVTVVRRDSLGRVRLESTAHLPVTWKVQ

SEQ ID NO: 397 - protein, 1084 aa, Corynebacterium diphtheriae
MKYHVGIDVGTFSVGLAAIEVDDAGMPIKTLSLVSHIHDSGLDPDKMKSAVTRLASSGIARRTRRLYRRKRRRLQQLDKFIQRQGWPVIELEDYSDPLYPWKVRAELAASYIADEKERGEKLSVALRHIARHRGWRNPYAKVSSLYLPDEPSDAFKSIREEIKRASGQPVPETATVGQMVTLCELGTLKLRGEGGVLSARLQQSDHAREIQEICRMQEIGQELYRKIIDVVFAAESPKGSASSRVGKDPLQPGKNRALKASDAFQRYRIAALIGNLRVRVDGEKRILSVEEKNLVFDHLVNLAPKKEPEWVTIAEILGIDRGQLIGTATMTDDGERAGARPPTHDTNRSIVNSRIAPLVDWWKTASALEQHAMVKALSNAEVDDFDSPEGAKVQAFFADLDDDVHAKLDSLHLPVGRAAYSEDTLVRLTRRMLADGVDLYTARLQEFGIEPSWTPPAPRIGEPVGNPAVDRVLKTVSRWLESATKTWGAPERVIIEHVREGFVTEKRAREMDGDMRRRAARNAKLFQEMQEKLNVQGKPSRADLWRYQSVQRQNCQCAYCGSPITFSNSEMDHIVPRAGQGSTNTRENLVAVCHRCNQSKGNTPFAIWAKNTSIEGVSVKEAVERTRHWVTDTGMRSTDFKKFTKAVVERFQRATMDEEIDARSMESVAWMANELRSRVAQHFASHGTTVRVYRGSLTAEARRASGISGKLEFLDGVGKSRLDRRHHAIDAAVIAFTSDYVAETLAVRSNLKQSQAHRQEAPQWREFTGKDAEHRAAWRVWCQKMEKLSALLTEDLRDDRVVVMSNVRLRLGNGSAHEETIGKLSKVKLGSQLSVSDIDKASSEALWCALTREPDFDPKDGLPANPERHIRVNGTHVYAGDNIGLFPVSAGSIALRGGYAELGSSFHHARVYKITSGKKPAFAMLRVYTIDLLPYRNQDLFSVELKPQTMSMRQAEKKLRDALATGNAEYLGWLVVDDELVVDTSKIATDQVKAVEAELGTIRRWRVDGFFGDTRLRLRPLQMSKEGIKKESAPELSKIIDRPGWLPAVNKLFSEGNVTVVRRDSLGRVRLESTAHLPVTWKVQ

SEQ ID NO: 398 - protein, 1084 aa, Corynebacterium diphtheriae
MKYHVGIDVGTFSVGLAAIEVDDAGMPIKTLSLVSHIHDSRLDPDKIKSAVTRLASSGIARRTRRLYRRKRRRLQQLDKFIQRQGWPVIELEDYSDPLYPWKVRAELAASYIADEKERGEKLSVALRHIARHRGWRNPYAKVSSLYLPDEPSDAFKAIREEIKRASGQPVPETATVGQMVTLCELGTLKLRGEGGVLSARLQQSDHAREIQEICRMQEIGQELYRKIIDVVFAAESPKGSASSRVGKDPLQPGKNRALKASDAFQRYRIAALIGNLRVRVDGEKRILSVEEKNLVFDHLVNLAPKKEPEWVTIAEILGIDRGQLIGTATMTDDGERAGARPPTHDTNRSIVNSRIAPLVDWWKTASALEQHAMVKALSNAEVDDFDSPEGAKVQAFFADLDDDVHAKLDSLHLPVGRAAYSEDTLVRLTRRMLADGVDLYTARLQEFGIEPSWTPPAPRIGEPVGNPAVDRVLKTVSRWLESATKTWGAPERVIIEHVREGFVTEKRAREMDGDMRRRAARNAKLFQEMQEKLNIQGKPSRADLWRYQSVQRQNCQCAYCGSPITFSNSEMDHIVPRAGQGSTNTRENLVAVCHRCNQSKGNTPFAIWAKNTSIEGVSVKEAVERTRHWVTDTGMRSTDFKKFTKAVVERFQRVTMDEEIDARSMESVAWMANELRSRVAQHFASRGTTVRVYRGSLTAEARRASGISGKLEFLDGVGKSRLDRRHHAIDAAVIAFTSDYVAETLAVRSNLKQSQAHRQEAPQWREFTGKDAEHRAAWRVWCQKMEKLSALLTEDLRDDRVVVMSNVRLRLGNGSAHEETIGKLSKVKLGSQLSVSDIDKASSEALWCALTREPDFDPKDGLPANPERHIRVNGTHVYAGDNIGLFPVSAGSIALRGGYAELGSSFHHARVYKITSGKKPAFAMLRVYTIDLLPYRNQDLFSVELKPQTMSMRQAEKKLRDALATGNAEYLGWLVVDDELVVDTSKIATDQVKAVEAELGTIRRWRVDGFFGDTRLRLRPLQMSKEGIKKESAPELSKIIDRPGWLPAVNKLFSEGNVTVVRRDSLGRVRLESTAHLPVTWKVQ

SEQ ID NO: 399 - protein, 1069 aa, Corynebacterium matruchotii
MAAIAIDDDGKPTEILSAISLIHDSGVDPDSAKSAATRLATSGIARRTRRLYRRKRKRLAKLDKFISSQGWPLKEFEKYEDPFYPWRVRAELATTAITDQQELGEKLSIALRHIARHRGWRNPYSKVTALYTVTEPSDAFLAMQEECAKQLGRTIPETITVGQLVTGMNLGKTRLRGENSLLAARPRQSDNANEIHTIAKVQGLSNELVRQIIDHVFAAESPKGSAAEQVGKDPLQPTKKRALKASDAFQQYRIAALIGNLRIRGGKGNRRLTTEETRLVFDYLRSLPAKQEPTWQLVAEQLKIDRGNLVGTAIMTDDGERAGAKPPVHDTNRIMENTKIKPLATWWKSADADARAAMVKALSNAEVDDFDSQAGAQVQEFFFGISDEDQEKLDGLHLPIGRAAYSEDTLDRLTKRMIGEGMDLYEARQAEFKISNDWAPPAPEIGERVGNPAVDRVLKATARWLNAAERQWGAPKSVNIEHVRAAFMSESSARELDRDNQQRAKRNVKVVAEMQEKLGIEGRPSRADVWRFQSIQRQNGKCAYCGAEISFKNSEMDHIIPQVGEGSTNTRDNLVAVCRECNSSKSNIAFAVWAENTSRPGVSVQKAIERTHHWVTDSGLRKPEFDKFRKQVCDRLRRKATDEPIDARSLESVAWMANELRSRIAQKFKDGDTKVRVYKGALTAEARRASGISGKLEFVDGKGKSRLDRRHHAVDAAVVAFTSNYVAETLALRSNMKFDQELRRKAPQWREFTGSDHVHQVEWTKWKYRMQALAELLNNALVQDRIVVMHNLRLRLGNGAAHEDTIGKLTRLKVGDAISTTDIDRASSEALWCALTRDPDYDPKTGLPENPNRTIRIHGTHLTASDEITVFPVAAASIPIRDGFAKLGSNYHHVRLFRVPSGKKYKYCLMQVYTVDLLKFRKEDLFTVELKPQTISVRTCEALLRKALANGTAEYLGWLVSDDELLIDTSSFDTPGIVKLREEYGPVNRWRLAGLTSVTRLNLRPLYLSKEGLKPNVNPEIKKIIDNRSWIITVNKLFSSGHVKIIRRDALGRPRLHSAAHLPICWEVK

SEQ ID NO: 400 - protein, 210 aa, Diplosphaera colitermitum
MSDILDKPIVLSLNRAWQVIGHRTVKQALVALNGGNADLPPALGLDIAYPKFDDGAWNFDRPLFLNPLPWSEWIELPVRDFDFAITTPRLRIRVPTVIVATQFAKMPVRIPRLTREAIFERDGGVCQYTGEHVGKHGGNLDHVVPRDRGGRDSFENLVWAKREINSLKANRLPHEAGLRLLRRPKAPAPLPASMTIREARHPDWRHFLTP

SEQ ID NO: 401 - protein, 1332 aa, Dolosigranulum pigrum
MQKNYTIGLDIGTNSVGWAVMKDDYTLIRKRMKVLGNTDIKKIKKNFWGVRLFDEGETAKETRLKRGTRRRYQRRRNRLIYLQDIFQQPMLAIDENFFHRLDDSFFVPDDKSYDRHPIFGSLEEEVAYHNTYPTIYHLRKHLADNPEKADLRLVYTALAHIVKYRGHFLIEGELNTENTSISETFEQFLDTYSDIFKEQLVGDISKVEEILSSKQSRSRKHEQIMALFPNENKLGNFGRFMMLIVGNTSNFKPVFDLDDEYKLKLSDETYEEDLDTLLGMTDDVFLDVFMAAKNVYDAVEMSAIISTDTGNSKAVLSNQMINFYDEHKVDLAQLKQFFKTHLPDKYYECFSDPSKNGYAGYIDGKTNQEDFYKYIEKVMKTIKSDKKDYFLDKIDREVFLRKQRSFYNSVIPHQIHLQEMQAILDRQSQYYPFLAENRDKIESLVTFRIPYYVGPLTVSDQSEFAWMERQSDEPIRPWNFDEIVNKERSAEKFIERMTNMDTYLLEEKVLPKRSLLYQTFEVYNELTKVRYTNEQGKTEKLNRQQKAEIIETLFKQKNRVREKDIANYLEQYGYVDGTDIKGVEDKFNASLSTYNDLAKIDGAKAYLDDPEYADVWEDIIKILTIFEDKAMRKKQLQTYSDTLSPEILKKLERKHYTGWGRFSKKLINGLRDEGSNKTILDYLKSDEGSSGPTNRNFMQLIRDNTLSFKKKIEDAQTIEDTTHIYDTVAELPGSPAIKKGIRQALKIVEEIIDIIGYEPENIVVEMARESQTTKKGKDLSKERLEKLTEAIKEFDGPSDVKVKDLKNENLRNDRLYLYYLQNGRDMYTNEPLDINNLSKYDIDHIIPQSFTTDNSIDNKVLVSRTKNQGNKSDDVPSINIVHKMKPFWRQLHKAGLISDRKFKNLTKAEHGGLTEADRAHFLNRQLVETRQITKHVANLLDSQYNTAEEQRINIVLLKSSMTSRFRKEFKLYKVREINDYHHGHDAYLNAVVATTIMKVYPNLKPQFVYGQYKKTSMFKEEKATARKHFYSNITKFFKKEKVVNEETGEILWDTERHLSTIKRVLSWKQMNIVKKVEKQKGQLWKETIYPKGDSSKLIPVKEGMDPQKYGGLSQVSEAFAVVITHEKGKKKQLKSDLISIPIVDQKAYEQHPTAYLEEAGYNNPTVLHELFKYQLFELEDGSRRMIASAKEFQKGNQMVLPLELVELLYHANRYDKVKFPDSIEYVHDNLAKFDDLLEYVIDFSNKYINADKNVQKIQKIYKEHGTEDVELTVESFVNLMTFTAMGAPATFKFYGESITRSRYTSITEFRGSTLIFQSITGLYETRYKLEDN

SEQ ID NO: 402 - protein, 921 aa, Enterococcus faecalis
MIPHQIHLAELQAIIHRQAAYYPFLKENQEKIEQLVTFRIPYYVGPLSKGDASTFAWLKRQSEEPIRPWNLQETVDLDQSATAFIERMTNFDTYLPSEKVLPKHSLLYEKFMVFNELTKISYTDDRGIKANFSGKEKEKIFDYLFKTRRKVKKKDIIQFYRNEYNTEIVTLSGLEEDQFNASFSTYQDLLKCGLTRAELDHPDNAEKLEDIIKILTIFEDRQRIRTQLSTFKGQFSAEVLKKLERKHYTGWGRLSKKLINGIYDKESGKTILGYLIKDDGVSKHYNRNFMQLINDSQLSFKNAIQKAQSSEHEETLSETVNELAGSPAIKKGIYQSLKIVDELVAIMGYAPKRIVVEMARENQTTSTGKRRSIQRLKIVEKAMAEIGSNLLKEQPTTNEQLRDTRLFLYYMQNGKDMYTGDELSLHRLSHYDIDHIIPQSFMKDDSLDNLVLVGSTENRGKSDDVPSKEVVKDMKAYWEKLYAAGLISQRKFQRLTKGEQGGLTLEDKAHFIQRQLVETRQITKNVAGILDQRYNANSKEKKVQIITLKASLTSQFRSIFGLYKVREVNDYHHGQDAYLNCVVATTLLKVYPNLAPEFVYGEYPKFQTFKENKATAKAIIYTNLLRFFTEDEPRFTKDGEILWSNSYLKTIKKELNYHQMNIVKKVEVQKGGFSKESIKPKGPSNKLIPVKNGLDPQKYGGFDSPIVAYTVLFTHEKGKKPLIKQEILGITIMEKTRFEQNRILFLEEKGFLRPRVLMKLPKYTLYEFPEGRRRLLASAKEAQKGNQMVLPEHLLTLLYHAKQCLLPNQSESLTYVEQHQPEFQEILERVVDFAEVHTLAKSKVQQIVKLFEANQTADVKEIAASFIQLMQFNAMGAPSTFKFFQKDIERARYTSIKEIFDATIIYQSTTGLYETRRKVVD

SEQ ID NO: 403 - protein, 1337 aa, Enterococcus faecalis; identical to SEQ ID NO: 115

SEQ ID NO: 404 - protein, 1337 aa, Enterococcus faecalis
MKKDYVIGLDIGTNSVGWAVMTEDYQLVKKKMPIYGNTEKKKIKKNFWGVRLFEEGHTAEDRRLKRTARRRISRRRNRLRYLQAFFEEAMTALDENFFARLQESFLVPEDKKWHRHPIFAKLEDEVAYHETYPTIYHLRKKLADSSEQADLRLIYLALAHIVKYRGHFLIEGKLSTENISVKEQFQQFMIIYNQTFVNGESRLVSAPLPESVLIEEELTEKASRTKKSEKVLQQFPQEKANGLFGQFLKLMVGNKADFKKVFGLEEEAKITYASESYEEDLEGILAKVGDEYSDVFLAAKNVYDAVELSTILADSDKKSHAKLSSSMIVRFTEHQEDLKNFKRFIRENCPDEYDNLFKNEQKDGYAGYITHAGKVSQLKFYQYVKKIIQDIAGAEYFLEKIAQENFLRKQRTFDNGVIPHQIHLAELQAIIHRQAAYYPFLKENQEKIEQLVTFRIPYYVGPLSKGDANTFAWLKRQSEEPIRPWNLQETVDLDQSATAFIERMTNFDTYLPSEKVLPKHSLLYEKFMVFNELTKISYTDDRGIKANFSGKEKEKIFDYLFKTRRKVKKKDIIQFYRNEYNTEIVTLSGLEEDQFNASFSTYQDLLKCGLTRAELDHPDNAEKLEDIIKILTIFEDRQRIRTQLSTFKGQFSAEVLKKLERKHYTGWGRLSKKLINGIYDKESGKTILDYLIKDDGVSKHYNRNFMQLINDSQLSFKNAIQKAQSSEHEETLSETVNELAGSPAIKKGIYQSLKIVDELVAIMGYAPKRIVVEMARENQTTSTGKRRSIQRLKIVEKAMAEIGSNLLKEQPTTNEQLRDTRLFLYYMQNGKDMYTGDELSLHRLSHYDIDHIIPQSFMKDDSLDNLVLVGSTENRGKSDDVPSKEVVKDMKAYWEKLYAAGLISQRKFQRLTKGEQGGLTLEDKAHFIQRQLVETRQITKNVAGILDQRYNAKSKEKKVQIITLKASLTSQFRSIFGLYKVREVNDYHHGQDAYLNCVVATTLLKVYPNLAPEFVYGEYPKFQTFKENKATAKAIIYTNLLRFFTEDEPRFTKDGEILWSNSYLKTIKKELNYHQMNIVKKVEVQKGGFSKESIKPKGPSNKLIPVKNGLDPQKYGGFDSPIVAYTVLFTHEKGKKPLIKQEILGITIMEKTRFEQNPILFLEEKGFLRPRVLMKLPKYTLYQFPEGRRRLLASAKEAQKGNQMVLPEHLLTLLYHAKQCLLPNQSESLAYVEQHQPEFQEILERVVDFAEVHTLAKSKVQQIVKLFEANQTADVKEIAASFIQLMQFNAMGAPSTFKFFQKDIERARYTSIKEIFDATIIYQSTTGLYETRRKVVD

SEQ ID NO: 405 - protein, 1337 aa, Enterococcus faecalis
MKKDYVIGLDIGTNSVGWAVMTEDYQLVKKKMPIYGNTEKKKIKKNFWGVRLFEEGHTAEDRRLKRTARRRISRRRNRLRYLQAFFEEAMTALDENFFARLQESFLVPEDKKWHRHPIFAKLEDEVAYHETYPTIYHLRKKLADSSEQADLRLIYLALAHIVKYRGHFLIEGKLSTENISVKEQFQQFMIIYNQTFVNGESRLVSTPLPESVLIEEELTEKASRTKKSEKVLQQFPQEKANGLFGQFLKLMVGNKADFKKVFGLEEEAKITYASESYEEDLEGILAKVGDEYSDVFLAAKNVYDAVELSTILADSDKKSHAKLSSSMIVRFTEHQEDLKNFKRFIRENCPDEYDNLFKNEQKDGYAGYITHAGKVSQLKFYQYVKKIIQDIAGAEYFLEKIAQENFLRKQRTFDNGVIPHQIHLAELQAIIHRQAAYYPFLKENQEKIEQLVTFRIPYYVGPLSKGDASTFAWLKRQSEEPIRPWNLQETVDLDQSATAFIERMTNFDTYLPSEKVLPKHSLLYEKFMVFNELTKISYTDDRGIKANFSGKEKEKIFDYLFKTRRKVKKKDIIQFYRNEYNTEIVTLSGLEEDQFNASFSTYQDLLKCGLTRAELDHPDNAEKLEDIIKILTIFEDRQRIRTQLSTFKGQFSAEVLKKLERKHYTGWGRLSKKLINGIYDKESGKTILDYLVKDDGVSKHYNRNFMQLINDSQLSFKNAIQKAQSSEHEETLSETVNELAGSPAIKKGIYQSLKIVDELVAIMGYAPKRIVVEMARENQTTSTGKRRSIQRLKIVEKAMAEIGSNLLKEQPTTNEQLRDTRLFLYYMQNGKDMYTGDELSLHRLSHYDIDHIIPQSFMKDDSLDNLVLVGSTENRGKSDDVPSKEVVKDMKAYWEKLYAAGLISQRKFQRLTKGEQGGLTLEDKAHFIQRQLVETRQITKNVAGILDQRYNAKSKEKKVQIITLKASLTSQFRSIFGLYKVREVNDYHHGQDAYLNCVVATTLLKVYPNLAPEFVYGEYPKFQTFKENKATAKAIIYTNLLRFFTEDEPRFTKDGEILWSNSYLKTIKKELNYHQMNIVKKVEVQKGGFSKESIKPKGPSNKLIPVKNGLDPQKYGGFDSPIVAYTVLFTHEKGKKPLIKQEILGITIMEKTRFEQNPILFLEEKGFLRPRVLMKLPKYTLYEFPEGRRRLLASAKEAQKGNQMVLPEHLLTLLYHAKQCLLPNQSESLAYVEQHQPEFQEILERVVDFAEVHTLAKSKVQQIVKLFEANQTADVKEIAASFIQLMQFNAMGAPSTFKFFQKDIERARYTSIKEIFDATIIYQSTTGLYETRRKVVD

SEQ ID NO: 406 - protein, 1337 aa, Enterococcus faecalis
MKKDYVIGLDIGTNSVGWAVMTEDYQLVKKKMPIYGNTEKKKIKKNFWGVRLFEEGHTAEDRRLKRTARRRISRRRNRLRYLQAFFEEAMTDLDENFFARLQESFLVPEDKKWHRHPIFAKLEDEVAYHETYPTIYHLRKKLADSSEQADLRLIYLALAHIVKYRGHFLIEGKLSTENISVKEQFQQFMIIYNQTFVNGESRLVSAPLPESVLIEEELTEKASRTKKSEKVLQQFPQEKANGLFGQFLKLMVGNKADFKKVFGLEEEAKITYASESYEEDLEGILAKVGDEYSDVFLAAKNVYDAVELSTILADSDKKSHAKLSSSMIVRFTEHQEDLKKFKRFIRENCPDEYDNLFKNEQKDGYAGYIAHAGKVSQLKFYQYVKKIIQDIAGAEYFLEKIAQENFLRKQRTFDNGVIPHQIHLAELQAIIHRQAAYYPFLKENQEKIEQLVTFRIPYYVGPLSKGDASTFAWLKRQSEEPIRPWNLQETVDLDQSATAFIERMTNFDTYLPSEKVLPKHSLLYEKFMVFNELTKISYTDDRGIKANFSGKEKEKIFDYLFKTRRKVKKKDIIQFYRNEYNTEIVTLSGLEEDQFNASFSTYQDLLKCGLTRAELDHPDNAEKLEDIIKILTIFEDRQRIRTQLSTFKGQFSAEVLKKLERKHYTGWGRLSKKLINGIYDKESGKTILGYLIKDDGVSKHYNRNFMQLINDSQLSFKNAIQKAQSSEHEETLSETVNELAGSPAIKKGIYQSLKIVDELVAIMGYAPKRIVVEMARENQTTSTGKRRSIQRLKIVEKAMAEIGSNLLKEQPTTNEQLRDTRLFLYYMQNGKDMYTGDELSLHRLSHYDIDHIIPQSFMKDDSLDNLVLVGSTENRGKSDDVPSKEVVKDMKAYWEKLYAAGLISQRKFQRLTKGEQGGLTLEDKAHFIQRQLVETRQITKNVAGILDQRYNANSKEKKVQIITLKASLTSQFRSIFGLYKVREVNDYHHGQDAYLNCVVATTLLKVYPNLAPEFVYGEYPKFQTFKENKATAKAIIYTNLLRFFTEDEPRFTKDGEILWSNSYLKTIKKELNYHQMNIVKKVEVQKGGFSKESIKPKGPSNKLIPVKNGLDPQKYGGFDSPIVAYTVLFTHEKGKKPLIKQEILGITIMEKTRFEQNPILFLEEKGFLRPRVLMKLPKYTLYEFPEGRRRLLASAKEAQKGNQMVLPEHLLTLLYHAKQCLLPNQSESLAYVEQHQPEFQEILERVVDFAEVHTLAKSKVQQIVKLFEANQTADVKEIAASFIQLMQFNAMGAPSTFKFFQKDIERARYTSIKEIFDATIIYQSTTGLYETRRKVVD

SEQ ID NO: 407 - protein, 936 aa, Enterococcus faecalis
MKKDYVIGLDIGTNSVGWAVMTEDYQLVKKKMPIYGNTEKKKIKKNFWGVRLFEEGHTAEDRRLKRTARRRISRRRNRLRYLQAFFEEAMTDLDENFFARLQESFLVPEDKKWHRHPIFAKLEDEVAYHETYPTIYHLRKKLADSSEQADLRLIYLALAHIVKYRGHFLIEGKLSTENISVKEQFQQFMIIYNQTFVNGESRLVSAPLPESVLIEEELTEKASRTKKSEKVLQQFPQEKANGLFGQFLKLMVGNKADFKKVFGLEEEAKITYASESYEEDLEGILAKVGDEYSDVFLAAKNVYDAVELSTILADSDKKSHAKLSSSMIVRFTEHQEDLKKFKRFIRENCPDEYDNLFKNEQKDGYAGYIAHAGKVSQLKFYQYVKKIIQDIAGAEYFLEKIAQENFLRKQRTFDNGVIPHQIHLAELQAIIHRQAAYYPFLKENQEKIEQLVTFRIPYYVGPLSKGDASTFAWLKRQSEEPIRPWNLQETVDLDQSATAFIERMTNFDTYLPSEKVLPKHSLLYEKFMVFNELTKISYTDDRGIKANFSGKEKEKIFDYLFKTRRKVKKKDIIQFYRNEYNTEIVTLSGLEEDQFNASFSTYQDLLKCGLTRAELDHPDNAEKLEDIIKILTIFEDRQRIRTQLSTFKGQFSAEVLKKLERKHYTGWGRLSKKLINGIYDKESGKTILGYLIKDDGVSKHYNRNFMQLINDSQLSFKNAIQKAQSSEHEETLSETVNELAGSPAIKKGIYQSLKIVDELVAIMGYAPKRIVVEMARENQTTSTGKRRSIQRLKIVEKAMAEIGSNLLKEQPTTNEQLRDTRLFLYYMQNGKDMYTGDELSLHRLSHYDIDHIIPQSFMKDDSLDNLVLVGSTENRGKSDDVPSKEVVKDMKAYWEKLYAAGLISQRKFQRLTKGEQGGLTLEDKAHFIQRQLVETR

SEQ ID NO: 408 - protein, 1337 aa, Enterococcus faecalis
MKKDYVIGLDIGTNSVGWAVMTEDYQLVKKKMPIYGNTEKKKIKKNFWGVRLFEEGHTAEDRRLKRTARRRISRRRNRLRYLQAFFEEAMTDLDENFFARLQESFLVPEDKKWHRHPIFAKLEDEVAYHETYPTIYHLRKKLADSSEQADLRLIYLALAHIVKYRGHFLIEGKLSTENISVKEQFQQFMIIYNQTFVNGESRLVSAPLPESVLIEEELTEKASRTKKSEKVLQQFPQEKANGLFGQFLKLMVGNKADFKKVFGLEEEAKITYASESYEEDLEGILAKVGDEYSDVFLAAKNVYDAVELSTILADSDKKSHAKLSSSMIVRFTEHQEDLKKFKRFIRENCPDEYDNLFKNEQKDGYAGYIAHAGKVSQLKFYQYVKKIIQDIAGAEYFLEKIAQENFLRKQRTFDNGVIPHQIHLAELQAIIHRQAAYYPFLKENQEKIEQLVTFRIPYYVGPLSKGDASTFAWLKRQSEEPIRPWNLQETVDLDQSATAFIERMTNFDTYLPSEKVLPKHSLLYEKFMVFNELTKISYTDDRGIKANFSGKEKEKIFDYLFKTRRKVKKKDIIQFYRNEYNTEIVTLSGLEEDQFNASFSTYQDLLKCGLTRAELDHPDNAEKLEDIIKILTIFEDRQRIRTQLSTFKGQFSAEVLKKLERKHYTGWGRLSKKLINGIYDKESGKTILDYLVKDDGVSKHYNRNFMQLINDSQLSFKNAIQKAQSSEHEETLSETVNELAGSPAIKKGIYQSLKIVDELVAIMGYAPKRIVVEMARENQTTSTGKRRSIQRLKIVEKAMAEIGSNLLKEQPTTNEQLRDTRLFLYYMQNGKDMYTGDELSLHRLSHYDIDHIIPQSFMKDDSLDNLVLVGSTENRGKSDDVPSKEVVKDMKAYWEKLYAAGLISQRKFQRLTKGEQGGLTLEDKAHFIQRQLVETRQITKNVAGILNQRYNANSKEKKVQIITLKASLTSQFRSIFGLYKVREVNDYHHGQDAYLNCVVATTLLKVYPNLAPEFVYGEYPKFQTFKENKATAKAIIYTNLLRFFTEDEPRFTKDGEILWSNSYLKTIKKELNYHQMNIVKKVEVQKGGFSKESIKPKGPSNKLIPVKNGLDPQKYGGFDSPVVAYTVLFTHEKGKKPLIKQEILGITIMEKTRFEQNPILFLEEKGFLRPRVLMKLPKYTLYEFPEGRRRLLASAKEAQKGNQMVLPEHLLTLLYHAKQCLLPNQSESLAYVEQHQPEFQEILERVVDFAEVHTLAKSKVQQIVKLFEANQTADVKEIAASFIQLMQFNAMGAPSTFKFFQKDIERARYTSIKEIFDATIIYQSTTGLYETRRKVVD

SEQ ID NO: 409 - protein, 1337 aa, Enterococcus faecalis
MKKDYVIGLDIGTNSVGWAVMTEDYQLVKKKMPIYGNTEKKKIKKNFWGVRLFEEGHTAEDRRLKRTARRRISRRRNRLRYLQAFFEEAMTDLDENFFARLQESFLVPEDKKWHRHPIFAKLEDEVAYHETYPTIYHLRKKLADSSEQADLRLIYLALAHIVKYRGHFLIEGKLSTENISVKEQFQQFMIIYNQTFVNGESRLVSAPLPESVLIEEELTEKASRTKKSEKVLQQFPQEKANGLFGQFLKLMVGNKADFKKVFGLEEEAKITYASESYEEDLEGILAKVGDEYSDVFLAAKNVYDAVELSTILADSDKKSHAKLSSSMIVRFTEHQEDLKKFKRFIRENCPDEYDNLFKNEQKDGYAGYIAHAGKVSQLKFYQYVKKIIQDIAGAEYFLEKIAQENFLRKQRTFDNGVIPHQIHLAELQAIIHRQAAYYPFLKENQEKIEQLVTFRIPYYVGPLSKGDASTFAWLKRQSEEPIRPWNLQETVDLDQSATAFIERMTNFDTYLPSEKVLPKHSLLYEKFMVFNELTKISYTDDRGIKANFSGKEKEKIFDYLFKTRRKVKKKDIIQFYRNEYNTEIVTLSGLEEDQFNASFSTYQDLLKCGLTRAELDHPDNAEKLEDIIKILTIFEDRQRIRTQLSTFKGQFSAEVLKKLERKHYTGWGRLSKKLINGIYDKESGKTILGYLIKDDGVSKHYNRNFMQLINDSQLSFKNAIQKAQSSEHEETLSETVNELAGSPAIKKGIYQSLKIVDELVAIMGYAPKRIVVEMARENQTTSTGKRRSIQRLKIVEKAMAEIGSNLLKEQPTTNEQLRDTRLFLYYMQNGKDMYTGDELSLHRLSHYDIDHIIPQSFMKDDSLDNLVLVGSTENLGKSDDVPSKEVVKDMKAYWEKLYAAGLISQRKFQRLTKGEQGGLTLEDKAHFIQRQLVETRQITKNVAGILDQRYNANSKEKKVQIITLKASLTSQFRSIFGLYKVREVNDYHHGQDAYLNCVVATTLLKVYPNLAPEFVYGEYPKFQTFKENKATAKAIIYTNLLRFFTEDEPRFTKDGEILWSNSYLKTIKKELNYHQMNIVKKVEVQKGGFSKESIKPKGPSNKLIPVKNGLDPQKYGGFDSPIVAYTVLFTHEKGKKPLIKQEILGITIMEKTRFEQNPILFLEEKGFLRPRVLMKLPKYTLYEFPEGRRRLLASAKEAQKGNQMVLPEHLLTLLYHAKQCLLPNQSESLAYVEQHQPEFQEILERVVDFAEVHTLAKSKVQQIVKLFEANQTADVKEIAASFIQLMQFNAMGAPSTFKFFQKDIERARYTSIKEIFDATIIYQSTTGLYETRRKVVD

SEQ ID NO: 410 - protein, 1337 aa, Enterococcus faecalis
MKKDYVIGLDIGTNSVGWAVMTEDYQLVKKKMPIYGNTEKKKIKKNFWGVRLFEEGHTAEDRRLKRTARRRISRRRNRLRYLQAFFEEAMTDLDENFFARLQESFLVPEDKKWHRHPIFAKLEDEVAYHETYPTIYHLRKKLADSSEQADLRLIYLALAHIVKYRGHFLIEGKLSTENTSVKEQFQQFMVIYNQTFVNGESRLVSAPLPESVLIEEELTEKASRTKKSEKVLQQFPQEKANGLFGQFLKLMVGNKADFKKVFGLEEEAKITYASESYEEDLEGILAKVGDEYSDVFLAAKNVYDAVELSTILADSDKKSHAKLSSSMIVRFTEHQEDLKKFKRFIRENCPDEYDNLFKNEQKDGYAGYIAHAGKVSQLKFYQYVKKIIQDIAGAEYFLEKIAQENFLRKQRTFDNGVIPHQIHLAELQAIIHRQAAYYPFLKENQEKIEQLVTFRIPYYVGPLSKGDASTFAWLKRQSEEPIRPWNLQETVDLDQSATAFIERMTNFDTYLPSEKVLPKHSLLYEKFMVFNELTKISYTDDRGIKANFSGKEKEKIFDYLFKTRRKVKKKDIIQFYRNEYNTEIVTLSGLEEDQFNASFSTYQDLLKCGLTRAELDHPDNAEKLEDIIKILTIFEDRQRIRTQLSTFKGQFSAEVLKKLERKHYTGWGRLSKKLINGIYDKESGKTILDYLVKDDGVSKHYNRNFMQLINDSQLSFKNAIQKAQSSEHEETLSETVNELAGSPAIKKGIYQSLKIVDELVAIMGYAPKRIVVEMARENQTTSTGKRRSIQRLKIVEKAMAEIGSNLLKEQPTTNEQLRDTRLFLYYMQNGKDMYTGDELSLHRLSHYDIDHIIPQSFMKDDSLDNLVLVGSTENRGKSDDVPSKKVVKKMKAYWEKLYAAGLISQRKFQRLTKGEQGGLTLEDKAHFIQRQLVETRQITKNVAGILDQRYNAKSKEKKVQIITLKASLTSQFRSIFGLYKVREVNDYHHGQDAYLNCVVATTLLKVYPNLAPEFVYGEYPKFQAFKENKATAKTIIYTNLMRFFTEDEPRFTKDSEILWSNSYLKTIKKELNYHQMNIVKKVEVQKGGFSKESIKPKGPSNKLIPVKNGLDPQKYGGFDSPVVAYTVLFTHEKGKKPLIKQEILGITIMEKTRFEQNPILFLEEKGFLRPRVLMKLPKYTLYEFPEGRRRLLASAKEAQKGNQMVLPEHLLTLLYHAKQCLLPNQSESLAYVEQHQPEFQEILERVVDFAEVHTLAKSKVQQIVKLFEANQTADVKEIAASFIQLMQFNAMGAPSTFKFFQKDIERARYTSIKEIFDATIIYQSTTGLYETRRKVVD

SEQ ID NO: 411 - protein, 1150 aa, Enterococcus faecalis
MYSIGLDLGISSVGWSVIDERTGNVIDLGVRLFSAKNSEKNLERRTNRGGRRLIRRKTNRLKDAKKILAAVGFYEDKSLKNSCPYQLRVKGLTEPLSKGEIYKVTLHILKKRGISYLDEDDTEAAKESQDYKEQVRENAQLLTKYTPGQIQLQRLKENNRVKTGINAQGNYQLNVFKVSAYANELATILKTQQAFYPNELTDDWIALFVQPGIAEEAGLIYRKRPYYHGPGNEANNSPYGRWSDFKKTGQPATNIFDKLIGKDFQGELRASGLSLSAQQYNLLNDLTNLKIDGEIPLSPEQKEYILAELMTKEFTRFGVNDVVKLLGVKKERLSGWRLDKKGKPEIHTLKGYRNWRKIFAESGIDLAMLPTETIDCLAKILTLNTEREGIENTLAFELPELAESVKLLVLDRYKELSQSVSTQAWHRFSLKTLHLLIPELMNATSEQNTLLEQFQLKSDVRKRYSEYKKLPTKDVLTEIYNPTVNKTVSQAFKVIDALLVKYGKEQIRYITIEMPRDDNEEDEKKRIKELHAKNSQRKNDSQSYFMQKSGWSQEKFQTTIQKNRRFLAKLLYYYEQDGICAYTGLSISPELLVSDSTEIDHIIPISISLDDSINNKVLVLSKANQVKGQQTPYDAWMDGSFKKINGKFSNWDDYQKWVESRHFSHKKENNLLETRNIFDSEQVEKFLARNLNDTRYASRLVLNTLQSFFANQETKVRVVNGSFTHTLRKKWGADLDKTRETHHHHAVDATLCAVTPFVKVSRYHYAVKEETGEKVMREIDFETGEIVDEMSYREFKKSKKYERKTYQVKWPNFREQLKPVNLHPRIKFSHQVDRKANRKLSDATIYSVREKTEVKTLKSGKQKITTDEYTIGKIKDIYTVDGWEAFKKKQDKLLMKDLDEKTYERLLSIAETTPDFQEVEEKNGKVKRVKRSPFAVYCEENDIPAIRKYAKKNNGPLIRSLKYYDGKLNKHINITKDSQGRPVEKTKNGRKVTLQSLKPYRYDIYQDLETKAYYTVQLYYSDLRFVEGKYGITEKEYMKKVAEQTKGQVVRFCFSLQKNDGLEIEWKDSQRYDVRFYNFQSANSINFKGLEQEMMPAENQFKQKPYNNGAINLNIAKYGKEGKKLRKFNTDILGKKHYLYYEKEPKNIIK

SEQ ID NO: 412 - protein, 1150 aa, Enterococcus faecalis
MYSIGLDLGISSVGWSVIDERTGNVIDLGVRLFSAKNSEKNLERRTNRGGRRLIRRKTNRLKDAKKILAAVGFYEDKSLKNSCPYQLRVKGLTEPLSKGEIYKVTLHILKKRGISYLDEDDTEAAKESQDYKEQVRKNAQLLTKYTPGQIQLQRLKENNRVKTGINAQGNYQLNVFKVSAYANELATILKTQQAFYPNELTDDWIALFVQPGIAEEAGLIYRKRPYYHGPGNEANNSPYGRWSDFKKTGQPATNIFDRLIGKDFQGELRASGLSLSAQQYNLLNDLTNLKIDGEIPLSPEQKEYILAELMTKEFTRFGVNDVAKLLGVKKERLSGWRLDKKGKPEIHTLKGYRNWRKIFAESGIDLATLPTETIDCLAKVLTLNTEHEGIENTLAFELPELAESVKLLVLDRYKELSQSVSTQAWHRFSLKTLHLLIPELMNATSEQNTLLEQFQLKSDVRKRYSEYKKLPTKDVLTEIYNPTVNKTVSQAFKVIDALLVKYGKEQIRYITIEMPRDDNEEDEKKRIKELHAKNSQRKNDSQSYFMQKSGWSQEKFQTTIQKNRRFLAKLLYYYEQDGICAYTGLSISPELLVSDSTEIDHIIPISISLDDSINNKVLVLSKANQVKGQQTPYDAWMDGSFKKINGKFSNWDDYQKWVESRHFSHKKENNLLETRNIFDSEQVEKFLARNLNDTRYASRLVLNTLQSFFANHETKVRVVNGSFTHTLRKKWGADLDKTRETHHHHAVDATLCAVTPFVKVSRYHYAVKEETGEKVMREIDFETGEIVDEMSYQEFKKSKKYERKTYQVKWPNFREQLKPVNLHPRIKFSHQVDRKANRKLSDATIYSVREKTEVKTLKSGKQKITTDEYTIGKIKDIYTVDGWEAFKKKQDKLLMKDLDEKTYERLLSIAETTPDFQEVEEKNGKVKRVKRSPFAVYCEENDIPAIQKYAKKNNGPLIRSLKYYDGKLNKHINITKDSQGRPVEKTKNGRKVTLQSLKPYRYDIYQDLETKAYYTVQLYYSDLRFVEGKYGITEKEYMKKVAEQTKGQVVRFCFSLQKNDGLEIEWKDSQRYDVRFYNFQSANSINFKGLEQEMMPAENQFKQKPYNNGAINLNIAKYGKEGKKLRKFNTDILGKKHYLYYEKEPKNIIK

SEQ ID NO: 413 - protein, 1150 aa, Enterococcus faecalis
MYSIGLDLGISSVGWSVIDERTGNVIDLGVRLFSAKNSEKNLERRTNRGGRRLIRRKTNRLKDAKKILAAVGFYEDKSLKNSCPYQLRVKGLTEPLSKGEIYKVTLHILKKRGISYLDEDDTEAAKESQDYKEQVRKNAQLLTKYTPGQIQLQRLKENNRVKTGINVQGNYQLNVFKVSAYANELATILKTQQAFYPNELTDDWIALFVQPGIAEEAGLIYRKRPYYHGPGNEANNSPYGRWSDFQKTGEPATNIFDKLIGKDFQGELRASGLSLSAQQYNLLNDLTNLKIDGEVPLSSEQKEYILTELMTKEFTRFGVNDVVKLLGVKKERLSGWRLDKKGKPEIHTLKGYRNWRKIFAEAGIDLATLPTETIDCLAKVLTLNTEREGIENTLAFELPELSESVKLLVLDRYKELSQSISTQSWHRFSLKTLHLLIPELMNATSEQNTLLEQFQLKSDVRKRYSEYKKLPTKDVLAEIYNPTVNKTVSQAFKVIDALLVKYGKEQIRYITIEMPRDDNEEDEKKRIKELHAKNSQRKNDSQSYFMQKSGWSQEKFQTTIQKNRRFLAKLLYYYEQDGICAYTGLPISPELLVSDSTEIDHIIPISISLDDSINNKVLVLSKANQVKGQQTPYDAWMDGSFKKINGKFSNWDDYQKWVESRHFSHKKENNLLETRNIFDSEQVEKFLARNLNDTRYASRLVLNTLQSFFTNQETKVRVVNGSFTHTLRKKWGADLDKTRETHHHHAVDATLCAVTPFVKVSRYHYAVKEETGEKVMREIDFETGEIVNEMSYREFKKSKKYERKTYQVKWPNFREQLKPVNLHPRIKFSHQVDRKANRKLSDATIYSVREKTEVKTLKSGKQKITTDEYTIGKIKDIYTLDGWEAFKKKQDKLLMKDLDEKTYERLLSIAETTPDFQEVEEKNGKVKRVKRSPFAVYCEENDIPAIQKYAKKNNGPLIRSLKYYDGKLNKHINITKDSQGRPVEKTKNGRKVTLQSLKPYRYDIYQDLETKAYYTVQLYYSDLRFVEGKYGITEKEYMKKVAEQTKGQVVRFCFSLQKNDGLEIEWKDSQRYDVRFYNFQSANSINFKGLEQEIMPAENQFKQKPYNNGAINLNIAKYGKEGKKLRKFNTDILGKKHYLFYEKEPKNIIK

SEQ ID NO: 414 - protein, 1150 aa, Enterococcus faecalis; identical to SEQ ID NO: 183

SEQ ID NO: 415 - protein, 1150 aa, Enterococcus faecalis; identical to SEQ ID NO: 184

SEQ ID NO: 416 - protein, 1340 aa, Enterococcus faecium
MKKEYTIGLDIGTNSVGWSVLTDDYRLVSKKMKVAGNTEKSSTKKNFWGVRLFDEGQTAEARRSKRTARRRLARRRQRILELQKIFAPEILKIDEHFFARLNESFLVLDEKKQSRHPVFATIKQEKSYHQTYPTIYHLRQALADSSEKADIRLVYLAMAHLLKYRGHFLIEGELNTENSSVTETFRQFLSTYNQQFSEADDKQTEKLDEAVDCSFVFTEKMSKTKKAETLLKYFPHEKSNGYLSQFIKLMVGNQGNFKNVFGLEEEAKLQFSKETYEEDLEELLEKIGDDYIDLFVQAKNVYDAVLLSEILSDSTKNTRAKLSAGMIRRYDAHKEDLVLLKRFVKENLPKKYRAFFGDNSVNGYAGYIEGHATQEDFYKFVKKELTGIRGSEVFLTKIEQENFLRKQRTFDNGVIPHQIHLTELRAIIANQKKHYPFLKEEQEKLESLLTFKIPYYVGPLAKKQENSPFAWLIRKSEEKIKPWNLPEIVDMEGSAVRFIERMNNTDMYIPHNKVLPKNSLLYQKFSIYNELTKVRYQDERGQMNYFSSIEKKEIFHELFEKNRKVTKKDLQEFLYLKYDIKHAELSGIEKAFNASYTTYHDFLTMSENKREMKQWLEDPELASMFEEIIKTLTVFEDREMIKTRLSHHEATLGKHIIKKLTKKHYTGWGRLSKELIQGIRDKQSNKTILDYLINDDDFPHHRNRNFMQLINDDSLSFKKEIKKAQMITDTENLEEIVKELTGSPAIKKGILQSLKIVDEIVGIMGYEPANIVVEMARENQTTGRGLKSSRPRLKALEESLKDFGSQLLKEYPTDNSSLQKDRLYLYYLQNGRDMYTGAPLDIHRLSDYDIDHIIPRSFTTDNSIDNKVLVSSKENRLKKDDVPSEKVVKKMRSFWYDLYSSKLISKRKLDNLTKIKLTEEDKAGFIKRQLVETRQITKHVAGILHHRFNKAEDTNEPIRKVRIITLKSALVSQFRNRFGIYKVREINEYHHAHDAYLNGVVALALLKKYPQLAPEFVYGEYLKFNAHKANKATVKKEFYSNIMKFFESDTPVCDENGEIFWDKSKSIAQVKKVINHHHMNIVKKTEIQKGGFSKETVEPKKDSSKLLPRKNNWDPAKYGGLGSPNVAYTVAFTYEKGKARKRTNALEGITIMEREAFEQSPVLFLKNKGYEQAEIEMKLPKYALFELENGRKRMVASNKEAQKANSFLLPEHLVTLLYHAKQYDEISHKESFDYVNEHHKEFSEVFARVLEFAGKYTLAEKNIEKLEKIYKENQTDDLAKLASSFVNLMQFNAMGAPADFKFFDVTIPRKRYTSLTEIWQSTIIHQSITGLYETRIRMGK

SEQ ID NO: 417 - protein, 1339 aa, Enterococcus faecium
MKKEYTIGLDIGTNSVGWSVLTDDYRLVSKKMKVAGNTEKSSTKKNFWGVRLFDEGQTAEARRSKRTARRRLARRRQRILELQKIFAPEILKIDEHFFARLNESFLVLDEKKQSRHPVFATIKQEKSYHQTYPTIYHLRQALADSSEKADIRLVYLAMAHLLKYRGHFLIEGELNTENSSVTETFRQFLSTYNQQFSEADDKQTEKLDEAVDCSFVFTEKMSKTKKAETLLKYFPHEKSNGYLSQFIKLMVGNQGNFKNVFGLEEAKLQFSKETYEEDLEELLEKIGDDYIDLFVQAKNVYDAVLLSEILSDSTKNTRAKLSAGMIRRYDAHKEDLVLLKRFVKENLPKKYRAFFGDNSVNGYAGYIEGHATQEDFYKFVKKELTGIRGSEVFLTKIEQENFLRKQRTFDNGVIPHQIHLTELRAIIANQKKHYPFLKEEQEKLESLLTFKIPYYVGPLAKKQENSPFAWLIRKSEEKIKPWNLPEIVDMEGSAVRFIERMINTDMYMPHNKVLPKNSLLYQKFSIYNELTKVRYQDERGQMNYFSSIEKKEIFHELFEKNRKVTKKDLQEFLYLKYDIKHAELSGIEKAFNASYTTYHDFLTMSENKREMKQWLEDPELASMFEEIIKTLTVFEDREMIKTRLSHHEATLGKHIIKKLTKKHYTGWGRLSKELIQGIRDKQSNKTILDYLINDDDFPHHRNRNFMQLINDDSLSFKKEIKKAQMITDTENLEEIVKELTGSPAIKKGILQSLKIVDEIVGIMGYEPANIVVEMARENQTTGRGLKSSRPRLKALEESLKDFGSQLLKEYPTDNSSLQKDRLYLYYLQNGRDMYTGAPLDIHRLSDYDIDHIIPRSFTTDNSIDNKVLVSSKENRLKKDDVPSEKVVKKMRSFWYDLYSSKLISKRKLDNLTKIKLTEEDKAGFIKRQLVETRQITKHVAGILHHRFNKAEDTNEPIRKVRIITLKSALVSQFRNRFGIYKVREINEYHHAHDAYLNGVVALALLKKYPQLAPEFVYGEYLKFNAHKANKATVKKEFYSNIMKFFESDTPVCDENGEIFWDKSKSIAQVKKVINHHHMNIVKKTEIQKGGFSKETVEPKKDSSKLLPRKNNWDPAKYGGLGSPNVAYTVAFTYEKGKARKRTNALEGITIMEREAFEQSPVLFLKNKGYEQAEIEMKLPKYALFELENGRKRMVASNKEAQKANSFLLPEHLVTLLYHAKQYDEISHKESFDYVNEHHKEFSEVFARVLEFAGKYTLAEKNIEKLEKIYKENQTDDLAKLASSFVNLMQFNAMGAPADFKFFDVTIPRKRYTSLTEIWQSTIIHQSITGLYETRIRMGK

SEQ ID NO: 418 - protein, 1340 aa, Enterococcus faecium
MKKEYTIGLDIGTNSVGWSVLTDDYRLVSKKMKVAGNTEKSSTKKNFWGVRLFDEGQTAEARRSKRTARRRLARRRQRILELQKIFAPEILKIDEHFFARLNESFLVLDEKKQSRHPVFATIKQEKSYHQTYPTIYHLRQALADSSEKADIRLVYLAMAHLLKYRGHFLIEGELNTENSSVTETFRQFLSTYNQQFSEADDKQTEKLDEAVDCSFVFTEKMSKTKKAETLLKYFPHEKSNGYLSQFIKLMVGNQGNFKNVFGLEEEAKLQFSKETYEEDLEELLEKIGDDYIDLFVQAKNVYDAVLLSEILSDSTKNTRAKLSAGMIRRYDAHKEDLVLLKRFVKENLPKKYRAFFGDNSVNGYAGYIEGHATQEDFYKFVKKELTGIRGSEVFLTKIEQENFLRKQRTFDNGVIPHQIHLTELRAIIANQKKHYPFLKEEQEKLESLLTFKIPYYVGPLAKKQENSPFAWLIRKSEEKIKPWNLPEIVDMEGSAVRFIERMINTDMYIPHNKVLPKNSLLYQKFSIYNELTKVRYQDERGQMNYFSSIEKKEIFHELFEKNRKVTKKDLQEFLYLKYDIKHAELSGIEKAFNASYTTYHDFLTMSENKREMKQWLEDPELASMFEEIIKTLTVFEDREMIKTRLSHHEATLGKHIIKKLTKKHYTGWGRLSKELIQGIRDKQSNKTILDYLINDDDFPHHRNRNFMQLINDDSLSFKKEIKKAQMITDTENLEEIVKELTGSPAIKKGILQSLKIVDEIVGIMGYEPANIVVEMARENQTTGRGLKSSRPRLKALEESLKDFGSQLLKEYPTDNSSLQKDRLYLYYLQNGRDMYTGAPLDIHRLSDYDIDHIIPRSFTTDNSIDNKVLVSSKENRLKKDDVPSEKVVKKMRSFWYDLYSSKLISKRKLDNLTKIKLTEEDKAGFIKRQLVETRQITKHVAGILHHRFNKAEDTNEPIRKVRIITLKSALVSQFRNRFGIYKVREINEYHHAHDAYLNGVVALALLKKYPQLAPEFVYGEYLKFNAHKANKATVKKEFYSNIMKFFESDTPVCDENGEIFWDKSKSIAQVKKVINHHHMNIVKKTEIQKGGFSKETVEPKKDSSKLLPRKNNWDPAKYGGLGSPNVAYTVAFTYEKGKARKRTNALEGITIMEREAFEQSPVLFLKNKGYEQAEIEMKLPKYALFELENGRKRMVASNKEAQKANSFLLPEHLVTLLYHAKQYDEISHKESFDYVNEHHKEFSEVFARVLEFAGKYTLAEKNIEKLEKIYKENQTDDLAKLASSFVNLMQFNAMGAPADFKFFDVTIPRKRYTSLTEIWQSTIIHQSITGLYETRIRMGK

SEQ ID NO: 419 - protein, 1340 aa, Enterococcus faecium
MKKEYTIGLDIGTNSVGWSVLTDDYRLVSKKMKVAGNTEKSSTKKNFWGVRLFDEGQTAEARRSKRTARRRLARRRQRILELQKIFAPEILKIDEHFFARLNESFLVLDEKKQSRHPVFATIKQEKSYHQTYPTIYHLRQALADSSEKADIRLVYLAMAHLLKYRGHFLIEGELNTENSSVTETFRQFLSTYNQQFSEADDKQTEKLDEAVDCSFVFTEKMSKTKKAETLLKYFPHEKSNGYLSQFIKLMVGNQGNFKNVFGLEEEAKLQFSKETYEEDLEELLEKIGDDYIDLFVQAKNVYDAVLLSEILSDSTKNTRAKLSAGMIRRYDAHKEDLVLLKRFVKENLPKKYRAFFGDNSVNGYAGYIEGHATQEDFYKFVKKELTGIRGSEVFLTKIEQENFLRKQRTFDNGVIPHQIHLTELRAIIANQKKHYPFLKEEQEKLESLLTFKIPYYVGPLAKKQENSPFAWLIRKSEEKIKPWNLPEIVDMEGSAVRFIERMINTDMYMPHNKVLPKNSLLYQKFSIYNELTKVRYQDERGQMNYFSSIEKKEIFHELFEKNRKVTKKDLQEFLYLKYDIKHAELSGIEKAFNASYTTYHDFLTMSENKREMKQWLEDPELASMFEEIIKTLTVFEDREMIKTRLSHHEATLGKHIIKKLTKKHYTGWGRLSKELIQGIRDKQSNKTILDYLINDDDFPHHRNRNFMQLINDDSLSFKKEIKKAQMITDTENLEEIVKELTGSPAIKKGILQSLKIVDEIVGIMGYEPANIVVEMARENQTTGRGLKSSRPRLKALEESLKDFGSQLLKEYPTDNSSLQKDRLYLYYLQNGRDMYTGAPLDIHRLSDYDIDHIIPRSFTTDNSIDNKVLVSSKENRLKKDDVPSEKVVKKMRSFWYDLYSSKLISKRKLDNLTKIKLTEEDKAGFIKRQLVETRQITKHVAGILHHRFNKAEDTNEPIRKVRIITLKSALVSQFRNRFGIYKVREINEYHHAHDAYLNGVVALALLKKYPQLAPEFVYGEYLKFNAHKANKATVKKEFYSNIMKFFESDTPVCDENGEIFWDKSKSIAQVKKVINHHHMNIVKKTEIQKGGFSKETVEPKKDSSKLLPRKNNWDPAKYGGLGSPNVAYTVAFTYEKGKARKRTNALEGITIMEREAFEQSPVLFLKNKGYEQAEIEMKLPKYALFELENGRKRMVASNKEAQKANSFLLPEHLVTLLYHAKQYDEISHKESFDYVNEHHKEFSEVFARVLEFAGKYTLAEKNIEKLEKIYKENQTDDLAKLASSFVNLMQFNAMGAPADFKFFDVTIPRKRYTSLTEIWQSTIIHQSITGLYETRIRMGK

SEQ ID NO: 420 - protein, 1339 aa, Enterococcus faecium
MKKEYTIGLDIGTNSVGWSVLTDDYRLVSKKMKVAGNTEKSSTKKNFWGVRLFDEGQTAEARRSKRTARRRLARRRQRILELQKIFAPEILKIDEHFFARLNESFLVLDEKKQSRHPVFATIKQEKSYHQTYPTIYHLRQALADSSEKADIRLVYLAMAHLLKYRGHFLIEGELNTENSSVTETFRQFLSTYNQQFSEADDKQTEKLDEAVDCSFVFTEKMSKTKKAETLLKYFPHEKSNGYLSQFIKLMVGNQGNFKNVFGLEEAKLQFSKETYEEDLEELLEKIGDDYIDLFVQAKNVYDAVLLSEILSDSTKNTRAKLSAGMIRRYDAHKEDLVLLKRFVKENLPKKYRAFFGDNSVNGYAGYIEGHATQEDFYKFVKKELTGIRGSEVFLTKIEQENFLRKQRTFDNGVIPHQIHLTELRAIIANQKKHYPFLKEEQEKLESLLTFKIPYYVGPLAKKQENSPFAWLIRKSEEKIKPWNLPEIVDMEGSAVRFIERMINTDMYIPHNKVLPKNSLLYQKFSIYNELTKVRYQDERGQMNYFSSIEKKEIFHELFEKNRKVTKKDLQEFLYLKYDIKHAELSGIEKAFNASYTTYHDFLTMSENKREMKQWLEDPELASMFEEIIKTLTVFEDREMIKTRLSHHEATLGKHIIKKLTKKHYTGWGRLSKELIQGIRDKQSNKTILDYLINDDDFPHHRNRNFMQLINDDSLSFKKEIKKAQMITDTENLEEIVKELTGSPAIKKGILQSLKIVDEIVGIMGYEPANIVVEMARENQTTGRGLKSSRPRLKALEESLKDFGSQLLKEYPTDNSSLQKDRLYLYYLQNGRDMYTGAPLDIHRLSDYDIDHIIPRSFTTDNSIDNKVLVSSKENRLKKDDVPSEKVVKKMRSFWYDLYSSKLISKRKLDNLTKIKLTEEDKAGFIKRQLVETRQITKHVAGILHHRFNKAEDTNEPIRKVRIITLKSALVSQFRNRFGIYKVREINEYHHAHDAYLNGVVALALLKKYPQLAPEFVYGEYLKFNAHKANKATVKKEFYSNIMKFFESDTPVCDENGEIFWDKSKSIAQVKKVINHHHMNIVKKTEIQKGGFSEETVEPKKDSSKLLPRKNNWDPAKYGGLGSPNVAYTVAFTYEKGKARKRTNALEGITIMEREAFEQSPVLFLKNKGYEQAEIEMKLPKYALFELENGRKRMVASNKEAQKANSFLLPEHLVTLLYHAKQYDEISHKESFDYVNEHHKEFSEVFARVLEFAGKYTLAEKNIEKLEKIYKENQTDDLAKLASSFVNLMQFNAMGAPADFKFFDVTIPRKRYTSLTEIWQSTIIHQSITGLYETRIRMGK

SEQ ID NO: 421 - protein, 1340 aa, Enterococcus faecium
MKKEYTIGLDIGTNSVGWSVLTDDYRLVSKKMKVAGNTEKSSTKKNFWGVRLFDEGQTAEARRSKRTARRRLARRRQRILELQKIFAPEILKIDEHFFARLNESFLVLDEKKQSRHPVFATIKQEKSYHQTYPTIYHLRQALADSSEKADIRLVYLAMAHLLKYRGHFLIEGELNTENSSVTETFRQFLSTYNQQFSEADDKQTEKLDEAVDCSFVFTEKMSKTKKAETLLKYFPHEKSNGYLSQFIKLMVGNQGNFKNVFGLEEEAKLQFSKETYEEDLEELLEKIGDDYIDLFVQAKNVYDAVLLSEILSDSTKNTRAKLSAGMIRRYDAHKEDLVLLKRFVKENLPKKYRAFFGDNSVNGYAGYIEGHATQEDFYKFVKKELTGIRGSEVFLTKIEQENFLRKQRTFDNGVIPHQIHLTELRAIIANQKKHYPFLKEEQEKLESLLTFKIPYYVGPLAKKQENSPFAWLIRKSEEKIKPWNLPEIVDMEGSAVRFIERMINTDMYIPHNKVLPKNSLLYQKFSIYNELTKVRYQDERGQMNYFSSIEKKEIFHELFEKNRKVTKKDLQEFLYLKYDIKHAELSGIEKAFNASYTTYHDFLTMSENKREMKQWLEDPELASMFEEIIKTLTVFEDREMIKTRLSHHEATLGKHIIKKLTKKHYTGWGRLSKELIQGIRDKQSNKTILDYLINDDDFPHHRNRNCMQLINDDSLSFKKEIKKAQMITDTENLEEIVKELTGSPAIKKGILQSLKIVDEIVGIMGYEPANIVVEMARENQTTGRGLKSSRPRLKALEESLKDFGSQLLKEYPTDNSSLQKDRLYLYYLQNGRDMYTGAPLDIHRLSDYDIDHIIPRSFTTDNSIDNKVLVSSKENRLKKDDVPSEKVVKKMRSFWYDLYSSKLISKRKLDNLTKIKLTEEDKAGFIKRQLVETRQITKHVAGILHHRFNKAEDTNEPIRKVRIITLKSALVSQFRNRFGIYKVREINEYHHAHDAYLNGVVALALLKKYPQLAPEFVYGEYLKFNAHKANKATVKKEFYSNIMKFFESDTPVCDENGEIFWDKSKSIAQVKKVINHHHMNIVKKTEIQKGGFSKETVEPKKDSSKLLPRKNNWDPTKYGGLGSPNVAYTVAFTYEKGKARKRTNALEGITIMEREAFEQSPVLFLKNKGYEQAEIEMKLPKYALFELENGRKRMVASNKEAQKANSFLLPEHLVTLLYHAKQYDEISHKESFDYVNEHHKEFSEVFARVLEFAGKYTLAEKNIEKLEKIYKENQTDDLAKLASSFVNLMQFNAMGAPADFKFFDVTIPRKRYTSLTEIWQSTIIHQSITGLYETRIRMGK

SEQ ID NO: 422 - protein, 892 aa, Enterococcus faecium
MTFKIPYYVGPLAKKQENSPFAWLIRKSEEKIKPWNLPEIVDMEGSAVRFIERMINTDMYMPHNKVLPKNSLLYQKFSIYNELTKVRYQDERGQMNYFSSIEKKEIFHELFEKNRKVTKKDLQEFLYLKYDIKHAELSGIEKAFNASYTTYHDFLTMSENKREMEQWLEDPELASMFEEIIKTLTVFEDREMIKTRLSHHKATLGKHIIKKLTKKHYTGWGRLSKELIQGIRDKQSNKTILDYLINDDDFPHHRNRNFMQLINDDSLSFKKEIKKAQMITDTENLEEIVKELTGSPAIKKGILQSLKIVDEIVGIMGYEPANIVVEMARENQTTGRGLKSSRPRLKALEESLKDFGSQLLKEYPTDNSSLQKDRLYLYYLQNGRDMYTGAPLDIHRLSDYDIDHIIPRSFTTDNSIDNKVLVSSKENRLKKDDVPSEKVVKKMRSFWYDLYSSKLISKRKLDNLTKIKLTEEDKAGFIKRQLVETRQITKHVAGILHHRFNKAEDTNEPIRKVRIITLKSALVSQFRNRFGIYKVREINEYHHAHDAYLNGVIALALLKKYPQLAPEFVYGEYLKFNAHKANKATVKKEFYSNIMKFFESDTPVCDENGEIFWDKSKSIAQVKKVINHHHMNIVKKTEIQKGGFSKETVEPKKDSSKLLPRKNNWDPAKYGGLGSPNVAYTVAFTYEKGKARKRTNALEGITIMEREAFEQSPVLFLKNKGYEQAEIEMKLPKYALFELENGRKRMVASNKEAQKANSFLLPEHLVTLLYHAKQYDEISHKESFDYVNEHHKEFSEVFARVLEFAGKYTLAEKNIEKLEKIYKENQTDDLAKLASSFVNLMQFNAMGAPADFKFFDVTIPRKRYTSLTEIWQSTIIHQSITGLYETRIRMGK

SEQ ID NO: 423 - protein, 1336 aa, Enterococcus hirae
MTKDYTIGLDIGTNSVGWAVLTDDYQLMKRKMSVHGNTEKKKIKKNFWGARLFDEGQTAEFRRTKRTNRRRLARRKYRLSKLQDLFAEELCKQDDCFFVRLEESFLVPEEKQYKPASIFPTLEEEKEYYQKYPTIYHLRQKLVDSTEKEDLRLVYLALAHLLKYRGHFLFEGDLDTENTSIEESFRVFLEQYSKQSDQPLIVHQPVLTILTDKLSKTKKVEEILKYYPTEKINSFFAQCLKLIVGNQANFKRIFDLEAEVKLQFSKETYEEDLESLLEKIGDEYLDIFLQAKKVHDAILLSEIISSTVKHTKAKLSSGMVERYERHKADLAKFKQFVKENVPQKATVFFKDTTKNGYAGYIKGKTTQEEFYKFVKKELSGVVGSEPFLEKIDQETFLLKQRTYTNGVIPHQVHLIELKAIIDQQKQHYPFLEEAGPKIIALFKFRIPYYVGPLAKEQEASSFAWIERKTAEKINPWNFSEVVDIEKSAMRFIQRMTKQDTYLPTEKVLPKNSLLYQKYMIFNELTKVSYKDERGVKQYFSGDEKQQIFKQLFQKERGKITVKKLQNFLYTHYHIENAQIFGIEKAFNASYSTYHDFMKLAKTNQKAMQEWLEQPEMEPIFEDIVKILTIFEDRQMIKHQLSKYQEVFGEKLLKEFARKHYTGWGRFSAKLIHGIRDRKTNKTILDYLINDDDVPANRNRNLMQLINDEHLSFKEEIAKATVFSKHKSLVDVIQDLPGSPAIKKGIWQSLKIVEELIAIIGYKPKNIVIEMARENQKTHRTSPRLKALENGLKQIGSTLLKEQPTDNKALQKERLYLYYLQNGRDMYTGEPLEIENLHQYEVDHIIPRSFIVDNSIDNKVLVASKQNQKKRDDVPKKQIVNEQRIFWNQLKEAKLISPKKYAYLTKIELTPEDKARFIQRQLVETRQITKHVANILHQSFNQEEEGTDCDGVQIITLKATLTSQFRQTFGLYKVREINPHHHAHDAYLNGFIANVLLKRYPKLAPEFVYGKYVKYSLARENKATAKKEFYSNILKFLESDEPFCDENGEIYWEKSHHLPRIKKVLSSHQVNVVKKVEQQKGGFYKETVNSKEKPDKLIERKNNWDVTKYGGFGSPVIAYAIAFVYAKGKTQKKTRAIEGITIMEQAAFEKDPTTFLKEKGFPQVTEFIKLPKYTLFEFDNGRRRFLASHKESQKGNPFILSDQLVTLLYHAQHYDKITYQESFDYVNTHLSDFSAILTEVLAFAEKYTLADKNIERIQELYEENKYGETSMIAQSFLQLLQFNAIGAPADFKFFGVTIPRKRYTSLTEIWDATIIYQSVTGLYETRIRMGDLWAGEQ

SEQ ID NO: 424 - protein, 116 aa, Enterococcus sp.
MYSIGLDLGISSVGWSVIDERTGNVIDLGVRLFSAKNSEKNLERRTNRGGRRLIRRKTNRLKDAKKILAAVGFYEDKSLKNSCPYQLRVKGLTELLSKGEIYKVTLHILKNVELVT

SEQ ID NO: 425 - protein, 1391 aa, Eubacterium sp.
MENKQYYIGLDVGTNSVGWAVTDTSYNLLRAKGKDMWGARLFDEAKTAVERRTKRTSRRRSEREKARKAMLKELFADEINKVDPNFFIRLEESKFFLDDRSENNRQRYTLFNDAKFTDKDYYEKYKTIFHLRSALINSDEKFDVRLVFLAILNLFSHRGHFLNASLKGDGEIQGVDIFYNDLYEVCEEFEIDLPQISNIDNFEKILSQKGKSRTKILEELSEELSISKKEKIKYSLLKLICGMKIKVVDIYADEDIQEDDKKKDLGFRESDYEKSSLEVKEIIGDDHFELIERAKAVHDIGLLANIIGNSKYLCEARVEAYDNHHKDLQKIKELLKKYDIKAYTDMFRKMTDKNYSAYVGSVNSNIAKERRSVDNRKIEDLYEYIKKIALKNISDDNEDKIEILKKIETGEFLKKQLTASNGVIPNQLQSRELRAILKKAENYLPFLKEKGEKNLTVSEMIIQLFEFQIPYYVGPLDKNPKKDKNANSWAVIPSGGRILPWNFEDKVDVKGSRKEFIEKMVRKCTYLSEEHTLPKQSLLYEKFMVLNEINNIKIDGEKISVEAKQKIYNDLFMKGKKVSQKAIKQELISLNIMSKDSVLSGIDTVCNAYLSSIAKFRGVFDENVNNQSTIDMIEDIIFLKTVYSDEKRFVKEEIVEKYGDEIDKDKIKRILGFKFSNWGNISKSFLELEGADVGTGEIRSIIQSLWETNFNLMELLSSRFTYMDELEKRVKKLEKPLSEWTIEDLDDMYLSSPVKRMIWQSMKIVDEIQTVIGYAPKRIFVEMTRSEGEKVRTKSRKDRLKELYSAIKEDSKQWVKELDAKDESYFRSKKMYLYYLQKGRCMYSGEVIELDKLMDDNLYDIDHIYPRSFVKDDSLDNLVLVKKEINNRKQNDPITPQIQASCQGFWKVLHEQGFISNEKYSRLTRKTQEFSDEEKLSFINRQIVETGQATKCMAQILQKSMGEDVDVVFSKARLVSEFRHKFELFKSRLINDFHHANDAYLNIVVGNSYFVKFTRNPANFIKDARKNPDNPAYKYHMDRFFERDVKSKSEVAWIGQSEGNAGTIAIVKKTMSKNSPLITKKVEEGHGSITKETIVGVKEIKFGRNKVEKADKTPKKANLQAYRPIKTSDERLCNILRYGGRTSISISGYCLVEYVKKRKTIRSLEAIPVYLGRKDSLSEEKLLNYFRYNLNDGGKDSVSDIRLCLPFISTNSLVKIDGYLYYLGGKNDDRIQLYNAYQLKMKKEEVEYIRKIEKAVSMSKFDEIDREKNPVLTEEKNIELYNKIQDKFENTVFSKRMSLVKYNKKDLSFGDFLKNKKSKFEEIDLEKQCKVLYNIIFNLSNLKEVDLSDIGGSKSTGKCRCKKNITNYKEFKLIQQSITGLYSCEKDLMTI

SEQ ID NO: 426 - protein, 1391 aa, Eubacterium yurii
MENKQYYIGLDVGTNSVGWAVTDTSYNLLRAKGKDMWGARLFEKANTAAERRTKRTSRRRSEREKARKAMLKELFADEINRVDPSFFIRLEESKFFLDDRSENNRQRYTLFNDATFTDKDYYEKYKTIFHLRSALINSDEKFDVRLVFLAILNLFSHRGHFLNASLKGDGDIQGMDVFYNDLVESCEYFEIELPRITNIDNFEKILSQKGKSRTKILEELSEELSISKKDKSKYNLIKLISGLEASVVELYNIEDIQDENKKIKIGFRESDYEESSLKVKEIIGDEYFDLVERAKSVHDMGLLSNIIGNSKYLCEARVEAYENHHKDLLKIKELLKKYDKKAYNDMFRKMTDKNYSAYVGSVNSNIAKERRSVDKRKIEDLYKYIEDTALKNIPDDNKDKIEILEKIKLGEFLKKQLTASNGVIPNQLQSRELRAILKKAENYLPFLKEKGEKNLTVSEMIIQLFEFQIPYYVGPLDKNPKKDNKANSWAKIKQGGRILPWNFEDKVDVKGSRKEFIEKMVRKCTYISDEHTLPKQSLLYEKFMVLNEINNIKIDGEKISVEAKQKIYNDLFVKGKKVSQKDIKKELISLNIMDKDSVLSGTDTVCNAYLSSIGKFTGVFKEEINKQSIVDMIEDIIFLKTVYGDEKRFVKEEIVEKYGDEIDKDKIKRILGFKFSNWGNLSKSFLELEGADVGTGEVRSIIQSLWETNFNLMELLSSRFTYMDELEKRVKKLEKPLSEWTIEDLDDMYLSSPVKRMIWQSMKIVDEIQTVIGYAPKRIFVEMTRSEGEKVRTKSRKDRLKELYNGIKEDSKQWVKELDSKDESYFRSKKMYLYYLQKGRCMYSGEVIELDKLMDDNLYDIDHIYPRSFVKDDSLDNLVLVKKEINNRKQNDPITPQIQASCQGFWKILHDQGFMSNEKYSRLTRKTQEFSDEEKLSFINRQIVETGQATKCMAQILQKSMGEDVDVVFSKARLVSEFRHKFELFKSRLINDFHHANDAYLNIVVGNSYFVKFTRNPANFIKDARKNPDNPVYKYHMDRFFERDVKSKSEVAWIGQSEGNSGTIVIVKKTMAKNSPLITKKVEEGHGSITKETIVGVKEIKFGRNKVEKADKTPKKPNLQAYRPIKTSDERLCNILRYGGRTSISISGYCLVEYVKKRKTIRSLEAIPVYLGRKDSLSEEKLLNYFRYNLNDGGKDSVSDIRLCLPFISTNSLVKIDGYLYYLGGKNDDRIQLYNAYQLKMKKEEVEYIRKIEKAVSMSKFDEIDREKNPVLTEEKNIELYNKIQDKFENTVFSKRMSLVKYNKKDLSFGDFLKNKKSKFEEIDLEKQCKVLYNIIFNLSNLKEVDLSDIGGSKSTGKCRCKKNITNYKEFKLIQQSITGLYSCEKDLMTI

SEQ ID NO: 427 - protein, 1142 aa, Facklamia hominis
MYSVGLDIGIASCGYSIINDVNGNIVELGTLLFKSRNSDNNEERRTNRGSRRLINRRRTRLDDGKKLLAEKGFKQDSKLKHVCPYELRVKGLHEKLTQGEIYKVVLHILKKRGISYLDESDENSSGIDGASYKDQVNLNLNLQKELTPGQIQLKRLKENGRIKSGVTFENGYQLNVFSVSAYANELNKILTKQSEYYSEIDQIWIDRFTKNGYRKEAGLVYRKRPYYDGPGNEKNNSIYGRWANFKEDGHPKENIFDQLIGLDSVDSTQVRASASTLTAQKYNLLNDLNNLTIIEDDRKFTTDEKVSIINYLMTQDITRFGPKELAKFYQLEVDQIRGWRIDNKGNPEIHSLKVYRDWKKIFNTSSIDLTSIQTWVVDELANVITLNTEIPSTLATLKIKIPDIDQQILNFVENNFYELKKKTSKNSWHSFSLKTLNILIPELLNTSEEQNTILERLNLKFDLKNKYAEKNQIPVKELLEQIYNPTVTKSVHQSIKLFNEIIEKYGKNNISYVTIEMPRDKNDQDQKDTIKRINKLNSERKNDSEKYFLERSGWDTIRFESALKKPRFAEKLLFYYEQKGKCAYSGQDILAESLLNESCEVDHIIPLSISFDDSIHNKVLVTASSNQEKGQRTPYMAFIDGAKLGQSWDDFVAWVNSCGFHRKKVQNLLYEENIFNPDVQRGFVSRNLNDTRYASRIVLNAIQSFFYKQKDLTKVKVVNGSFTHTLRKKWGSSLDKNRDTYHHHAVDATLCAVTPFINIVKYEFFEEDGIKYMVDLTTGEKVAYSDYKKMKFYDKRAYVPIWDGFIKQLTPANLYPKIKFSHQVDSKWNRKISDATIYSTRKIVETKINKKGVAKETVKDIVIDKIKDIYTPEGWRKFKEKQDKLLMKNFDEKTYNKLIKIAKEYPEKKEVQTSNGKVSLVEVSPFKMYCEEQNVPAIRKYSKKGNGPYIRSLKFYDKELGKHINITKDSYGNDIERTIRNKKIILKNQNSWRTDVYYNSVNNCYELLGIKYCHLKFYRGKYGIPKSIYDELKKEDEISSESVFKFSLYRHDRVRFEKDGEYIEALFGSKNESNKNYLELSPIDKNKWLSKENVKFFGEVAASGRFIKGLKPGIKVIKQSTDYMGHVYAIHQEKLKFVLSDA

SEQ ID NO: 428 - protein, 1347 aa, Finegoldia magna
MKSEKKYYIGLDVGTNSVGWAVTDEFYNILRAKGKDLWGVRLFEKAKTAADTRTFRSGRRRNDRKGMRLQILREIFEDEIKKVDKDFYDRLDESKFWAEDKKVSGKYSLFNDKNFSDKQYFEKFPTIFHLRKYLMEEHGKVDIRYYFLAINQMMKRRGHFLIDGQISHVTDDKPLKEQLILLINDLLKIELEEELMDSIFEILADVNEKRTDKKNNLKELIKGQDFNKQEGNILNSIFESIVTGKAKIKNIISDEDILEKIKEDNKEDFVLTGDSYEENLQYFEEVLQENITLFNTLKSTYDFVILQSILKGKSTLSDAQVERYDEHKKDLEILKKVIKKYDEDGKLFKQVFKEDNGNGYVSYIGYYLNKNKKITAKKKISNIEFTKYVKGILEKQCDCEDEAVKYLLGKIEQENFLLKQISSINSVIPHQIHLFELDKILENLAKNYPSFNNKKEEFTKIEKIRKTFTFRIPYYVGPLNDYHKNNGGNAWIFRNKGEKIRPWNFEKIVDLHKSEEEFIKRMLNQCTYLPEETVLPKSSILYSEYMVLNELNNLRIKGKPLDTDVKLKLIEELFKKKTKVTLKSIRDYMIRNNFADKEDFDNSEKNLEIVSNMKSYIDFNNILGDKFELEMVEDLIEKITIHTGNKTLLKKYIEETYPDLSSSQIQKIINLKYKDWGRLSRKLLDGIKGRNKTDDVNTVINFMRNSSDNLMQIIEGKNYSFNEYIDNLRKKYIPQEISYEVVENLYVSPSVKKMIWQVIRVTEEITKVMGYDPDKIFIEMAKSEEEKKTTISRKNKLLDLYKAIKKDERDSQYEKLLTGLNKLDESELRSKKLYLYYTQMGRDMYTGEKIDLDKLFDSTHYDKDHIIPQSMKKDDSIINNLVLVNKNANQTTKGNIYPVPSSIRNNPDIYNYWKYLMEKEFISKEKYNRLIRNTPLTNEELGVFINRQLVETRQSTKAIKELFEKFYQKSKIIPVKASLASDLRKDMNTLKSREVNDLHHAHDAFLNIVAGDVWNREFTSNPINYVNENREGDKVKYSLSKYFTRPRKSKGKVIWTPEKGRKLIVDTLNKPSVLISNESHVKKGELFNATISGKKDYKKGKIYLPLKKDDRLKDVSKYGGYKAINGAFFFLVEHTKSKKRIRSIELFPLHLLSKFYEDKNTVLDYAINVLQLQDPKIIIDKINYRTEIIIDNFSYLISTKSNDGSITVKPNEQMYWRVDEISNLKKIENKYKKDAILTEEDRKIMESYIDKIYQQFKAGKYKNRRTTDTIIEKYEIIDLDTLDNKQLYQLLVAFISLSYKTSNNAVDFTVIGLGTECGKPRITNLPDNTYLVYKSITGIYEKRIRIK

SEQ ID NO: 429 - protein, 1348 aa, Finegoldia magna; identical to SEQ ID NO: 227

SEQ ID NO: 430 - protein, 1516 aa, Flavobacteriaceae bacterium
MLKQQKDKIIGMNKKILGLDLGTNSIGWALVKQDLENKYGEIIGCGSRIIPMSQDVLGKFDAGISISQTAERTNYRSVRKLIQRNTLRRERLHRVLHQLDFLPKHYNDSIDFEKKLGQFKTDKETKLNYFVNQHGKHEFLFKDSFNEMVKEFKEEQPELFYIKNNGKETKIPYDWTIYYLRKKALSKKISKEELSWLVLNFNQKRGYYQLRGEIDEEKEKNKRYEKLYVSEVVKTNNTIKKTGEYLYDIYFDNGWKYEKQTTKPQDWLHKHKEFIITTTTLKNGETKRTFKTVDSEKDWIAIKSKTEQDIKESNKTVGAFIYDTLLKNPTQKIRGSLVKTIERKFYREEFEKILKEQIKHRPEINVNTAIGKENYTKCVTELYPRNEAHANNILTNDFNYLFTKDILFYQRPLKSKKSEIANCQYEYRTYIKKKEKTGKEERVKQPLKATPKSHPLFQEFRLWQFIHNLKIYIRETTVGNKPLFDVDITDTFFTSENDWATLFEYLNNKKEIEQKHVLEYLVSKKIISKSEKTDYRWNYVEDKKYPGNETRVDFINRLKKVENLNVDEFLTSELEFKLWHIIYSVTDKNEYEKALENFAIRQNIDKDSFVNSFKKFPPFKSDYGAYSTKAIKKLLPLMRLGKFWDGSEIPKVVVEKITDIKTRLTSVNYDESLFKKDEKKILETIVDDITPKQLLKSFVKLKGKNHLAGLNTYQACYLVYERHSESSDITQWENPDDIDSFLNHFKQHSLRNPIVEQVVTETLRTVRDIWKYYGNGSPNYFNEIHIELGREMKNPADKRKQMSAKINENENTNQRIKGILQELMNDGVQDIKPYSPSQQEILKIYEEGISQNPNVDYSKVSEDEITKIKKSNNPTLKEIQRYKLWLEQKYISPYTGKPIPLSELFTPAYQIEHIIPQSRYFDNSLSNKIICESEVNEDKSNKTAYEYLKTNGGSIVHGHHLLSLKEYEDHCQHYFKKNRTKLKNLLSEEIPEGFINRQLNDSRYISKLIKGLLSNIVREENEQEATSKNIVPVTGSITSKLKQDWGLNDKWNEIIAPRFKRLNKMTNSNDFGYFDEKINTFRIQVPDAISRGFNKKRIDHRHHTLDALVIACCTKKHIQYLNSLNNEIIKHELKPSILIKNAQGDYTKHFMLPWNNFPIDCKNAIENTIVSFKQNLRVINKTSNKYQSYKDENGNLRLGKDGKPKKGLTKQTKGNNWAVRKAMHEDTFYGEIVDGENKGKLKIKTLLDTSFDVKKIEDKVLDKSIRTILINYLKQDKYKNLSKPHEEAFSPNGIIEMNKNIISLNNNIPHKPIKRVTLKHEKGKKFSIKTLLDKKTKFAKSATGTNVFFCIYKNINGKIKYHTPSFEEIIEIQKQEFEIKYKSKLNVPETLFDKKESFELLFYLQPNDLVYLPNDEELKNRQLIDFNNLNKKQIKRIYKFTDGSGTTANFIPYQVAKVIFNLNKKEQAKSSFKYPIQNEFGVGSPQSKNQKSIEGILIKERCIKLKIDRLGNISKA

SEQ ID NO: 431 - protein, 1629 aa, Francisella cf.
MNFKILPIAIDLGVKNTGVFSAFYQKGTSLERLDNKNGKVYELSKDSYTLLMNNRTARRHQRRGIDRKQLVKRLFKLIWTEQLNLEWDKDTQQAISFLFNRRGFSFITDGYSPEYLNIVPEQVKAILMDIFDDYNGEDDLDSYLKLATEQESKISEIYNKLMQKILEFKLRKLCTDIKDDKVSTKTLKEITSYEFELLADYLANYSEILKTQKFSYTDKQGNLKELSYYHHDKYNIQEFLKRHATINIQILDTLLTDDLDIWNFNFEKFDFDKNEEKLQNQEDKDHIQAHLHHFVFAVNKIKSEMASGGRHRSQYFQEITNVLDENNHQEGYLKNFCENLHNKKYSNLSVKNLVNLIGNLSNLELKPLRKYFNDKIHAKADHWDEQKFTETYCHWILGEWRVGVKDQDKKDGAKYSYKDLCNELKQKVTKAGLVDFLLELDPCRTIPPYLDNNNRKPPKCQSLILNPKFLDNQYPNWQQYLQELKKLQSIQNYLESFETDLKVLKSSKDQPYFVEYRSSNQQIASGQRDYKDLDARILQFIFDRVKASDELLLNEIYFQAKKLKQKASSELEKLESSKKLDEVIANSQLSQILKSQHTNGIFEQGTFLHLVCKYYKQRQRARDSRLYIMPEYRYDKKLHKYNNTGRFDDDNQLLTYCNHKPRQKRYQLLNDLAGVLQVSPNFLKDKIGSDDDLFISKWLVEHIRGFKKACEDSLKIQKDNRGLLNHKINIARNTKGKCEKEIFNLICKIEGSEDKKGNYKHGLAYELGVLLFGEPNEASKPEFDRKIKKFNSIYSFAQIQQIAFAERKGNANTCAVCSADNAHRMQQIKITEPVEDNKDKIILSAKAQRLPAITTRIVDGAVKKMATILAKNIVDDNWQNIKQVLSAKHQLHIPIITESNAFEFEPALADVKGKSLKDRRKKALERISPENIFKDKNNRIKEFAKGISAYSGANLTDGDFDGAKEELDHIIPRSHKKYGTLNDEANLICVTRGDNKNKGNRIFCLRDLANNYKLKQFETTDDLEIEKKIADTIWDANKKDFKFGNYRSFINLTPQEQKAFRHALFLADENPIKQAVIRAINNRNRTFVNGTQRYFAEVLANNIYLRAKKENLNTDKISFDYFGIPTIGNGRGIAEIRQLYEKVDSDIQAYAKGDKPQASYSHLIDAMLAFCIAADEHRNDGSIGLEIDKNYSLYPLDKNTGEVFTKDIFSQIKITDNEFSDKKLVRKKATEGFNTHRQMTRDGIYAENYLPILIHKELDEVRKGYTWKNSEEIKIFKGKKYDIQQLNNLLYCLKFVDKPISIDIQISTLEELRNILTTNNIAATAEYYYINLKTQKLHEYYIENYNTALGYKKYTKEMEFLRSLAYRSERVKIKSIDDVKQVLDKDSNFIIGKITLPFKKEWQRLYREWQNITIKDDYEFLKSFFNVKSITKLHKKVRKDFSLPISTNEGKFLVKRKTWDNNFIYQILNDSDSRVDGTKPFIPAFDISKNEIVEAIIDSFTSKNIFWLPKNIELQKVDNKNIFAIDTSKWFEVETPSDLRDIGVATIQYKIDNNSRPKVRVKLDYVIDDDSKINYFTNHSLLKSRYPDKVLEILKQSTIIEFESSGFNKTIKEMLGMTLAGIYNETSNN

SEQ ID NO: 432 - protein, 1646 aa, Francisella cf.
MNIKILPIAIDLGAKNTGVFSAFYQKGTSLESLDNKNGKVYELSKDSYTLLMNNRTARRHQRRGIDRKQLVKRLFKLIWTKQLNLEWNKDTQQTISFLLNRRGFSFITDGYSPEYLNIAPEAVKAILMSILDDYNGEDDLDSYLQSATENDSKIDELYNKLLQKALEFKLRKLCIDIKEDKVTTKTLKELSNTEFKLLANYLVDYDRILRTQKFSYTDKQGNLRELNYYHHDKYNIQEFLKRNIIINDVILEKLTDDLDIWNLNFDKFDFEKNLEKLENQEDKDYLQTHLHHFVFAVNKIKSEMASGGRHRSQYFQEITNVLVENNHQEGYLKNFCENLHNKKYSNLSVKNLVNLIGNLSNLELKPLRKYFNDKIHAKADYWDEQKFAETYSDWILGEWRVGAKDKDKKDGAKYSYKNLCDELKQKVGINQDGIINQTKSDFVDFLLELDPCRTIPPYLDNNNRKPPKCQSLILNPKFLDNKYPNWQQYLQELKKLQTVQNYLGNFEIDLKDLKSSKEQPYFVKYKSLNQQIASGQRDYKDLDARVLQFIFDRVKASDELLLNEIYSHAKKLKQNTSSELEKLELCKKLDEVIANSQLSQILKSQHVNGIFEQGTFLHLVCKYYKQRQRARDSRLYIMPEYRYDKKLDKYNNTGRFDDDNQLLTYCNHKPRQKRYQLLNDLAGVLQVSPNFLKDKIGSDDDLFISKWLVEHIRGFKKACEDSLKIQKDNRGLLNHKINIARNTKGKCEKEIFNLICKIEGSEDKKGNYKHGLAYELGVLLFGEPNQASKLEFDRKIKKFNSIYSFAQIQQIAFAERKGNANTCAVCSADNAHRMQQIKVAKPVEGNKDNIILSAKAQRLPAIPTRIVDGAVKKIATILARNIVDDNWDNIKQALSNNQQLHVPIITESNAFEFEPALADIKGKSLKDKRKKALERIDPENVFKDKNNRIKEFAKGISAYSDANLANGDFDGAKEELDHIIPRSHKKYGTLNDEANLICVTREDNQNRGNKAVFLYDLKPNYKLKQFNTTDDLEIEKKIADTIWDASKQDFKFGNYRSFINLTPQEQIAFRHALFLADKNPIKKAVIRAIDNRNRTFVNGTQRYFAEVLANNIYLRAKKENLATNRITFDYFGIETTNSNGRGIADVRKLYEKVDSDIQAYAKGDKPQDSYSHLIDAMIAFCVAADEHKNEGSIGLKMGNQYGLFPTPDKYDENTGEIISWHNDDIFRKIKVSDNQFSDKKLVRKKATEGFNTHRQMTRDGIYGESYLPILIHKNLNEVRKGYNWENSEEIKIFKGKKYDIQQLNNLVYCLKFVDKPISIDIQITTLEELRNILETNNISTTAEYYYINLKTQKLHEYYIENYNTALGYKKYTKEMEFLRSLAYRTERVKIKSIDDVSMILAKDSNFKAGKIELPFKTEWQRLYLEWQNTTIKDNHEFLKSYFSVKNATKQHKKVRKDFSLPISTNEGKLLVKRKTWDNNFIYQILNDSDSRADGTKPFIPAFDISKNEIVETIIKSFTSKNIFWLPKNIELQKVDNKSIFAIDTSRWFEVETPKDLIEIGVSTIQYKIDNNSRPKVRVKLDYVMDDDSKINYFMNHSLLKSRYPDKVLEILKQSTIIEFESSGFNKTIKEMLGMTLAGIYNETSNN

SEQ ID NO: 433 - protein, 1629 aa, Francisella novicida
MNFKILPIAIDLGVKNTGVFSAFYQKGTSLERLDNKNGKVYELSKDSYTLLMNNRTARRHQRRGIDRKQLVKKLFKLIWTEQLNLEWDKDTQQAISFLFNRRGFSFITDGYSPEYLNIVPEQVKAILMDIFDDYNGEDDLDSYLKLATEQESKISEIYNKLMQKILEFKLRKLCTDIKDDKVSTKTLKEITSYEFELLADYLANYSESLKTQKFSYTDKQGNLKELSYYHHDKYNIQEFLKRHATINDEILDTLLTDDLDIWNFNFEKFDFDKNEEKLQNQEDKDHTQAHLHHFVFAVNKIKSEMASGGRHRGQYFQEITNVLDENNHQEGYLKNFCENLHNKKYSNLSVKNLVNLIGNLSNLELKPLRKYFNDKIHAKADHWDEQKFTETYCHWILGEWRVGLKDQDKKEGAKYSYKDLCNELKQKVTNAGLIDFLLELDPCRTIPPYLDNNNRKPPKCQSLILNPKFLDNQYPNWQQYLQELKKLQIIQDYLESFETDLKVLKSSKDQPYFVEYKSSNQQIASGQRDYKDLDARILQFIFDRVKASDELLLNEIYFQAKKLKQKASSELEKLESSKKLDEVIANSQLSKILKSQHTNGIFEQGTFLHLVCKYYKQRQRARDSRLYIMPEYRYDKKLDKYNNTGRFDDDNQLLTYCNHKPRQKRYQLLNDLAGVLQVSPNFLKDKIGSDDDLFISKWLVEHIRGFKKACEDSLKIQKDNRGLLNHKINIARNTKGKCEKEIFNLICKIEGSEDKKGNYKHGLAYELGVLLFGEPNEASKPEFDRKIKKFNSIYSFAQIQQIAFAERKGNANTCAVCSADNAHRMQQIKITEPVEDNKDKIILSAKAQRLPAIPTRIVDGAVKKMATILAKNIVDDNWQNIKQVLSAKHQLHIPIITESNAFEFEPALADVKGKSLKDRRKKALERISPENIFKDKNNRIKEFAKGISAYSGANLTDGDFDGAKEELDHIIPRSHKKYGTLNDEANLICVTRDDNKNKGNRIFCLHDLANNYKLKQFETTDDLEIEKKIADTIWDASKKDFKFGNYRSFINLTPQEQKAFRHALFLADENPIKQAVIRAINNRNRTFVNGTQRYFAEVLANNIYLRAKKENLNTDKISFDYFGIPTIGNGRGIAEIRQLYEKVDSDIQVYAKGDKPQASYSHLIDAMLAFCIAADEHRNDGSIGLEIDKNYSLYPLDKNTGEVFTKDIFSQIKITDNEFSDKKLVRKKATEGFNTHRQMTRDGIYAENYLPILIHKELDEVRKGYTWKNSEEIKIFKGKKYDIQQLNNLLYCLKFVDKPISIDIQISTLEELRNILTTNNIAATAEYYYINLKTQKLHEYYIENYNTALGYKKYTKEMEFLRSLAYRSERVKIKSIDDVKQVLDKDSNFIIGKITLPFKKEWQRLYREWQNTTIKDDYEFLKSFFNVKSITKLHKKVRKDFSLPISTNEGKFLVKRKTWDNNFIYQILNDSDSRVDGTKPFIPAFDISKNEIVEAIIDSFTSKNIFWLPKNIELQKVDNKNIFAIDTSKWFEVETPSDLRDIGVATIQYKIDNNSRPKVRVKLDYVIDDDSKINYFTNHSLLKSRYPDKVLEILKQSTIIEFESSGFNKTIKEMLGMTLAGIYNETSNN

SEQ ID NO: 434 - protein, 1629 aa, Francisella novicida
MNFKILPIAIDLGVKNTGVFSAFYQKGTSLERLDNKNGKVYELSKDSYTLLMNNRTARRHQRRGIDRKQLVKRLFKLIWTEQLNLEWDKDTQQAISFLFNRRGFSFITDGYSPEYLNIVPEQVKAILMDIFDDYNGEDDLDSYLKLATEQESKISEIYNKLMQKILEFKLMKLCTDIKDDKVSTKTLKEITSYEFELLADYLANYSESLKTQKFSYTDKQGNLKELSYYHHDKYNIQEFLKRHATINDRILDTLLTDDLDIWNFNFEKFDFDKNEEKLQNQEDKDHIQAHLHHFVFAVNKIKSEMASGGRHRSQYFQEITNVLDENNHQEGYLKNFCENLHNKKYSNLSVKNLVNLIGNLSNLELKPLRKYFNDKIHAKADHWDEQKFTETYCHWILGEWRVGVKDQDKKDGAKYSYKDLCNELKQKVTKAGLVDFLLELDPCRTIPPYLDNNNRKPPKCQSLILNPKFLDNQYPNWQQYLQELKKLQSIQNYLDSFETDLKVLKSSKDQPYFVEYKSSNQQIASGQRDYKDLDARILQFIFDRVKASDELLLNEIYFQAKKLKQKASSELEKLESSKKLDEVIANSQLSQILKSQHTNGIFEQGTFLHLVCKYYKQRQRARDSRLYIMPEYRYDKKLHKYNNTGRFDDDNQLLTYCNHKPRQKRYQLLNDLAGVLQVSPNFLKDKIGSDDDLFISKWLVEHIRGFKKACEDSLKIQKDNRGLLNHKINIARNTKGKCEKEIFNLICKIEGSEDKKGNYKHGLAYELGVLLFGEPNEASKPEFDRKIKKFNSIYSFAQIQQIAFAERKGNANTCAVCSADNAHRMQQIKITEPVEDNKDKIILSAKAQRLPAIPTRIVDGAVKKMATILAKNIVDDNWQNIKQVLSAKHQLHIPIITESNAFEFEPALADVKGKSLKDRRKKALERISPENIFKDKNNRIKEFAKGISAYSGANLTDGDFDGAKEELDHIIPRSHKKYGTLNDEANLICVTRGDNKNKGNRIFCLRDLADNYKLKQFETTDDLEIEKKIADTIWDANKKDFKFGNYRSFINLTPQEQKAFRHALFLADENPIKQAVIRAINNRNRTFVNGTQRYFAEVLANNIYLRAKKENLNTDKISFDYFGIPTIGNGRGIAEIRQLYEKVDSDIQAYAKGDKPQASYSHLIDAMLAFCIAADEHRNDGSIGLEIDKNYSLYPLDKNTGEVFTKDIFSQIKITDNEFSDKKLVRKKAIEGFNTHRQMTRDGIYAENYLPILIHKELNEVRKGYTWKNSEEIKIFKGKKYDIQQLNNLVYCLKFVDKPISIDIQISTLEELRNILTTNNIAATAEYYYINLKTQKLHEYYIENYNTALGYKKYSKEMEFLRSLAYRSERVKIKSIDDVKQVLDKDSNFIIGKITLPFKKEWQRLYREWQNTTIKDDYEFLKSFFNVKSITKLHKKVRKDFSLPISTNEGKFLVKRKTWDNNFIYQILNDSDSRVDGTKPFIPAFDISKNEIVEAIIDSFTSKNIFWLPKNIELQKVDNKNIFAIDTSKWFEVETPSDLRDIGVATIQYKIDNNSRPKVRVKLDYVIDDDSKINYFTNHSLLKSRYPDKVLEILKQSTTIEFESSGFNKTIKEMLGMTLAGIYNETSNN

SEQ ID NO: 435 - protein, 244 aa, Francisella tularensis
ARKQNSEIYNKLMQKILEFKLRKLCTDIKDDKVSTKTLKEITSYEFELLADYLANYSESLKTQKFSYTDKQGNLKELSYYHHDKYNIQEFLKRHATINDEILDTLLTDDFDIWNFNFEKFDFDKNEEKLQNQEDKDHTQAYLHHFVFAVNKIKSEMASGGRHRSQYFQEITNVLDENNHQEGYLKNFCENLHNKKYSNLSVKNLVNLVGNLSNLELKPLRKYFNDKNLIIGMSKSLQKLIATGY

SEQ ID NO: 436 - protein, 501 aa, Francisella tularensis
MEIEKKIADTIWDASKQDFKFGNYRSFINLTPQEQKAFRYALFLADENSIKQAVIRAINNRNRTFVNGTQRYFAEVLANNIYLRAKKENLNTDKISFDYFGIPTIGNGRGIADIRQLYEKVDSDIQAYAKGDKPQASYSHLIDAMIAFCVAADEHRNDGSIGLEIDKNYSLYLLDKNTGEVFTKDIFSQIKITDNEFSDKKLVRKKATEGFNTHRQMTRDGIYAENYLPILIHKELDEVRKGYTWGNSEELKIHKGKKYNIQQLNNIVYCLKFIDKSISIDIQISTLEELRNILTTNNIAATAEYYYINLKNQKLHEYYIENYNTALDYKKYSKEMEFLRSLAYRSERVKIKSIDDVKQVLDKDSNFIIGKITLPFKKEWQRLYLEWQNTTIKDDYEFLKSFFNVKSITKLHKKVRKDFSLPISTNEGKFLVKRKTWDNNFIYQILNDSDSRVDGTKPFIPAFDISKNEIVEAIIDSFTSKNIFWLPKNIELQNVDKIFLL

SEQ ID NO: 437 - protein, 158 aa, Francisella tularensis
MIDFLLELDPCITIPPYLDNNNRKPPKCQSLILNPKFLDNQYPNWQQYLQELKKLQSIQDYLDSFETDLKDLKSSKDQPYFVEYKSSNQQMASGQRDYKDLDARILQFIFDRVKASDELLLNEIYFQAKKLKQKASSELEKLESSKKLDEVIANSQLS

SEQ ID NO: 438 - protein, 878 aa, Francisella tularensis
MLNDLAGVLQVSRNQLLSSVEEWFQQAQRVGEISKSQDEQIFEWLKSFKIASYCKAAVEMQKQYRGTLKNAIQTAIFRQSENINKNKNKNKNTGNQQQALSENSKDVKSLTADEKKLLKLIENIAKASQKIGESLGLNDKQIKKFNSIYNFAQIQQIAFAERKGNANTCAVYSADNAHRMQQIKITELVEDNKDNIILSAKAQRLPAIPTRIVDGAVKKMATILAKNIVDDNWQNIKQVLSAKHQLHIPIITESNAFEFEPALADVKGKSLKDRRKKALERISPENIFKDKNNRIKEFAKGISAYSGANLTDGDFDGAKEELDHIIPRSYKKYGTLNDEVNLICVTRDDNKNKGKRIFCLNDLANNYKLKQFETTDDLEIEKKIADTIWDASKQDFKFGNYRSFINLIPQEQKAFRYALFLADENSIKQAVIRAINNRNRTFVNGTQRYFAEVLANNIYLRAKKENLNTDKISFDYFGIPTIGNGRGIADIRQLYEKVDSDIQAYAKGDKPQASYSHLIDAMIAFCVAADEHRNDGSIGLEIDKNYSLYPLDKNTGEVFTKDIFSQIKITDNEFSDKKLVRKKATEGFNTHRQMTRDGIYAENYLPILIHKELDEVRKGYTWGNSEELKIHKGKKYNIQQLNNIVYCLKFIDKSISIDIQISTLEELRNILTTNNIAATAEYYYINLKNQKLHEYYIENYNTALDYKKYSKEMEFLRSLAYRSERVKIKSIDDVKQVLDKDSNFIIGKITLPFKKEWQRLYLEWQNTTIKDDYEFLKSFFNVKSINKLHKKVRKDFSLPISTNEGKFLVKRKTWDNNFIYQILNDSDSRVDGTKPFIPAFDISKNEIVEAIIDSFTSKNIFWLPKNIELQKVDKIFLL

SEQ ID NO: 439 - protein, 292 aa, Francisella tularensis
MLNDLAGVLQVSRNQLLSSVEEWFQQAQRVGEISKSQDEQIFEWLKSFKIASYCKAAVEMQKQYRGTLKNAIQTAIFRQSENINKNKNKNTGNQQQALSENSKDVKSLTADEKKLLKLIENIAKASQKIGESLGLNDKQIKKFNSIYNFAQIQQIAFAERKGNANTCAVYSADNAHRMQQIKITELVEDNKDNIILSAKAQRLPAIPTRIVDGAVKKMVTILAKNIVDDNWQNIKQVLSAKHQLHIPIITESNAFEFEPALADVKGKSLKDRRKKALERISPENIFKDKNIC

SEQ ID NO: 440 - protein, 53 aa, Francisella tularensis
MNHSLLKSRYPDKVLEILKQSTIIEFESSGFNKTIKEMLGMTLAGIYNETSNN

SEQ ID NO: 441 - protein, 393 aa, Francisella tularensis
MNVKILPIAIDLDVKNTGVFSAFYQKGTSLEKLDNKNGKVYELSKDSYTLLMNNRTAQRHQRRGIDRKQLVKRLFKLVWTEQLNLEWDKDTQQAISFLFNRRGFSFITDGYSTEYLNIVPEQVKAILMDIFDDYNGEDDLDSYLKLATEQESKISEIYNKLMQKILEFKLRKLCTDIKDDKVSTKTLKEITSYEFELLADYLANYSESLKTQKFSYTDKQGNLKELSYYHHDKYNIQEFLKRHATINDEILDTLLTDDFDIWNFNFEKFDFDKNEEKLQNQEDKDHTQAYLHHFVFAVNKIKSEMASGGRHRSQYFQEITNVLDENNHQEGYLKNFCENLHNKKYSNLSVKNLVNLVGNLSNLELKPLRKYFNDKNLIIGMSKSLQKLIATGY

SEQ ID NO: 442 - protein, 1629 aa, Francisella tularensis
MNVKILPIAIDLGVKNTGVFSAFYQKGTSLERLDNKNGKVYELSKDSYTLLMNNRTARRHQRRGIDRKQLVKRLFKLIWTEQLNLEWDKDTQQAISFLFNRRGFSFITDGYSPEYLNIVPEQVKAILMDIFDDYNGEDDLDSYLKLATEQESKISEIYNKLMQKILEFKLRKLCTDIKDDKVSTKTLKEITSYEFELLADYLANYSEILKTQKFSYTDKQGNLKELSYYHHDKYNIQEFLKRHATINDEILDTLLTDDLDIWNFNFEKFDFDKNEEKLQNQEDKDHTQAHLHHFVFAVNKIKSEMASGGRHRGQYFQEITNVLDENNHQEGYLKNFCENLHNKKYSNLSVKNLVNLIGNLSNLELKPLRKYFNDKIHAKADHWDEQKFTETYCHWILGEWRVGVKDQDKKDGAKYSYKDLCNELKQKVTKAGLVDFLLELDPCRTIPPYLDNNNRKPPKCQSLILNPKFLDNQYPNWQQYLQELKKLQSIQNYLESFETDLKVLKSSKDQPYFVEYKSSNQQIASGQRDYKDLDARILQFIFDRVKASDELLLNEIYFQAKKLKQKASSELEKLESSKKLDEVIANSQLSQILKSQHTNGIFEQGTFLHLVCKYYKQRQRARDSRLYIMPEYRYDKKLDKYNNTGRFDDDNQLLTYCNHKPRQKRYQLLNDLAGVLQVSPNFLKDKIGSDDDLFISKWLVEHIRGFKKACEDSLKIQKDNRGLLNHKINIARNTKGKCEKEIFNLICKIEGSEDKKGNYKHGLAYELGVLLFGEPNEASKPEFDRKIKKFNSIYSFAQIQQIAFAERKGNANTCAVCSADNAHRMQQIKITEPVEDNKDKIILSAKAQRLPAIPTRIVDGAVKKMATILAKNIVDDNWQNIKQVLSAKHQLHIPIITESNAFEFEPALADVKGKSIKDRRKKALERISPENIFKDKNNRIKEFAKGISAYSGDNLASGDFDGAKEELDHIIPRSHKKYGTLNDEANLICVTRDDNKNKGNRIFCLHDLANNYKLKQFETTDDLEIEKKIADTIWDASKKDFKFGNYRSFINLTPQEQKAFRHALFLADENPIKQAVIRAINNRNRTFVNGTQRYFAEVLANNIYLRAKKENLNTDKISFDYFGIPTIGNGRGIVEIRQLYEKVDSDIQAYAKGDKPQASYSHLIDAMLAFCIAADEHRNDGSIGLEIDKNYSLYPLDKNTGEVFTKDIFSQIKITNNEFSDKKLVRKKATEGFNTHRQMTRDGIYAENYLPILIHKELDEVRKGYTWGNSEELKIHKGKKYDIQQLNNLVYCLKFIDKSISIDIQISTLEELRNILTTNNIATTAEYYYINLKTQKLHEYYIENYNTALGYKKYTKEMEFLRSLAYRSERVKIKSIDDVKQVLDKDSNFIIGKITLPFKKEWQRLYREWQNTTIKDDYEFLKSFFNVKSITKLHKKVRKDFSLPISTNEGKFLVKRKTWDNNFIYQILNDSDSRVDGTKPFIPAFDISKNEIVEAIIDSFTSKNIFWLPKNIELQKVDNKNIFAIDTSKWFEVETPSDLRDIGVATIQYKIDNNSRPKVRVKLDYVIDDDSKINYFTNHSLLKSRYPDKVLEILKQSTIIEFESSGFNKTIKEMLGMTLAGIYNETSNN

SEQ ID NO: 443 - protein, 285 aa, Francisella tularensis
MTRDGIYAENYLPILIHKELDEVRKGYTWGNSEELKIHKGKKYNIQQLNNIVYCLKFIDKSISIDIQISTLEELRNILTTNNIAATAEYYYINLKNQKLHEYYIENYNTALDYKKYSKEMEFLRSLAYRSERVKIKSIDDVKQVLDKDSNFIIGKITLPFKKEWQRLYLEWQNTTIKDDYEFLKSFFNVKSITKLHKKVRKDFSLPISTNEGKFLVKRKTWDNNFIYQILNDSDSRVDGTKPFIPAFDISKNEIVEAIIDSFTSKNIFWLPKNIELQKVDKIFLL

SEQ ID NO: 444 - protein, 1323 aa, Fructobacillus fructosus
MVYDVGLDIGTGSVGWVALDENGKLARAKGKNLVGVRLFDTAQTAADRRGFRTTRRRLSRRKWRLRLLDELFSAEINEIDSSFFQRLKYSYVHPKDEENKAHYYGGYLFPTEEETKKFHRSYPTIYHLRQELMAQPNKRFDIREIYLAIHHLVKYRGHFLSSQEKITIGSTYNPEDLANAIEVYADEKGLSWELNNPEQLTEIISGEAGYGLNKSMKADEALKLFEFDNNQDKVAIKTLLAGLTGNQIDFAKLFGKDISDKDEAKLWKLKLDDEALEEKSQTILSQLTDEEIELFHAVVQAYDGFVLIGLLNGADSVSAAMVQLYDQHREDRKLLKSLAQKAGLKHKRFSEIYEQLALATDEATIKNGISTARELVEESNLSKEVKEDTLRRLDENEFLPKQRTKANSVIPHQLHLAELQKILQNQGQYYPFLLDTFEKEDGQDNKIEELLRFRIPYYVGPLVTKKDVEHAGGDADNHWVERNEGFEKSRVTPWNFDKVFNRDKAARDFIERLTGNDTYLIGEKTLPQNSLRYQLFTVLNELNNVRVNGKKFDSKTKADLINDLFKARKTVSLSALKDYLKAQGKGDVTITGLADESKFNSSLSSYNDLKKTFDAEYLENEDNQETLEKIIEIQTVFEDSKIASRELSKLPLDDDQVKKLSQTHYTGWGRLSEKLLDSKIIDERGQKVSILDKLKSTSQNFMSIINNDKYGVQAWITEQNTGSSKLTFDEKVNELTTSPANKRGIKQSFAVLNDIKKAMKEEPRRVYLEFAREDQTSVRSVPRYNQLKEKYQSKSLSEEAKVLKKTLDGNKNKMSDDRYFLYFQQQGKDMYTGRPINFERLSQDYDIDHIIPQAFTKDDSLDNRVLVSRPENARKSDSFAYTDEVQKQDGSLWTSLLKSGFINRKKYERLTKAGKYLDGQKTGFIARQLVETRQIIKNVASLIEGEYENSKAVAIRSEITADMRLLVGIKKHREINSFHHAFDALLITAAGQYMQNRYPDRDSTNVYNEFDRYTNDYLKNLRQLSSRDEVRRLKSFGFVVGTMRKGNEDWSEENTSYLRKVMMFKNILTTKKTEKDRGPLNKETIFSPKSGKKLIPLNSKRSDTALYGGYSNVYSAYMTLVRANGKNLLIKIPISIANQIEVGNLKINDYIVNNPAIKKFEKILISKLPLGQLVNEDGNLIYLASNEYRHNAKQLWLSTTDADKIASISENSSDEELLEAYDILTSENVKNRFPFFKKDIDKLSQVRDEFLDSDKRIAVIQTILRGLQIDAAYQAPVKIISKKVSDWHKLQQSGGIKLSDNSEMIYQSATGIFETRVKISDLL

SEQ ID NO: 445 - protein, 1367 aa, Fusobacterium sp.
MKKQKFSDYYLGFDIGTNSVGWCVTDLDYNVLRFNKKDMWGSRLFDEAKTAAERRVQRNSRRRLKRRKWRLNLLEEIFSDEIMKIDSNFFRRLKESSLWLEDKNSKEKFTLFNDDNYKDYDFYKQYPTIFHLRDELIKNPEKKDIRLIYLALHSIFKSRGHFLFEGQNLKEIKNFETLYNNLISFLEDNGINKSIDKDNIKKLEKIICDSGKGLKDKEKEFKEIFNSDKQLVAIFKLSVGSSVSLNDLFDTDEYKKEEVEKEKISFREQIYEDDKPIYYSILGEKIELLDIAKSFYDFMVLNNILSDSNYISEAKVKLYEEHKKDLKNLKYIIRKYNKENYDKLFKDKNENNYPAYIGLNKEKGKKEVVEKSGLKIDDLIKVIKGYLPKPERIEEKDKTIFNEILNKIELKTILPKQRISDNGTLPYQIHEVELEKILENQSKYYDFLNYEENGVSTKDKLLKTFKFRIPYYVGPLNSYHKDKGGNSWIVRKEEGKILPWNFEQKVDIEKSAEEFIKRMTNKCTYLNGEDVIPKDSFLYSEYIILNELNKVQVNDEFLNEENKRKIIDELFKENKKVSEKKFKEYLLVNQIANRTVELKGIKDSFNSNYVSYIKFKDIFGEKLNLDIYKEISEKSILWKCLYGDDKKIFEKKIKNEYGDILNKDEIKKINSFKFNTWGRLSEKLLTGIEFINLETGECYSSVMEALRRTNYNLMELLSSKFTLQESIDNGNKEMNEVSYRDLIEESYVSPSLKRAILQTLKIYEEIKKITGRVPKKVFIEMARGGDETMKNKKIPARQEQLKKLYDSCGNDIANFSIDIKKMKSSLSSYDNNSLRQKKLYLYYLQFGKCMYTGREIDLDRLLQNNDTYDIDHIYPRSKVIKDDSFDNLVLVLKNENAEKSNEYPVKKEIQEKMKSFWRFLKEKNFISDEKYKRLTGKDDFELRGFMARQLVNVRQTTKEVGKILQQIEPEIKIVYSKAEIASSFREMFDFIKVRELNDTHHAKDAYLNIVAGNVYNTKFTEKPYRYLQEIKENYDVKKIYNYDIKNAWDKENSLEIVKKNMKKNTVNITRFIKEEKGQLFDLNPIKKGETSNEIISIKPKLYNGKEEKLNEKYGYYKSLNPAYFLYVEHKEKNKRIKSFERVNLVDVNNIKDEKSLVKYLIENKKLVEPRLIKKVYKRQVILINDYPYSIVALDSNKLMDFENLKPLFLENKYEKILKNVIKFLEDNQGKSEENYKFIYLKKKDRYEKNETLESVKDRYNLEFNEMYDKFLEKLDSKDYKNYINNKKYKNLLDVKEKFIKLNLFDKAFTLKSFLDLFNRKTMADFSKVGLTKYLGKIQKISSNVLSKNELYLLEESVTGLFVKKIKL

SEQ ID NO: 446 - protein, 1367 aa, Fusobacterium sp.
MKKQKFSDYYLGFDIGTNSVGWCVTDLDYNVLRFNKKDMWGSRLFDEAKTAAERRVQRNSRRRLKRRKWRLNLLEEIFSDEIMKIDSNFFRRLKESSLWLEDKNSKEKFTLFNDDNYKDYDFYKQYPTIFHLRDELIKNPEKKDIRLIYLALHSIFKSRGHFLFEGQNLKEIKNFETLYNNLISFLEDNGINKSIDKDNIKKLEKIICDSGKGLKDKEKEFKEIFNSDKQLVAIFKLSVGSSVSLNDLFDTDEYKKEEVEKEKISFREQIYEDDKPIYYSILGEKIELLDIAKSFYDFMVLNNILSDSNYISEAKVKLYEEHKKDLKNLKYIIRKYNKENYDKLFKDKNENNYPAYIGLNKEKGKKEVVEKSGLKIDDLIKVIKGYLPKPERIEEKDKIIFNEILNKIELKTILPKQRISDNGTLPYQIHEVELEKILENQSKYYDFLNYEENGVSTKDKLLKTFKFRIPYYVGPLNSYHKDKGGNSWIVRKEEGKILPWNFEQKVDIEKSAEEFIKRMTNKCTYLNGEDVIPKDSFLYSEYIILNELNKVQVNDEFLNEENKRKIIDELFKENKKVSEKKFKEYLLVNQIANRTVELKGIKDSFNSNYVSYIKFKDIFGEKLNLDIYKEISEKSILWKCLYGDDKKIFEKKIKNEYGDILNKDEIKKINSFKFNTWGRLSEKLLTGIEFINLETGECYSSVMEALRRTNYNLMELLSSKFTLQESIDNGNKEMNEVSYRDLIEESYVSPSLKRAILQTLKIYEEIKKITGRVPKKVFIEMARGGDETMKNKKIPARQEQLKKLYDSCGNDIANFSIDIKKMKSSLSSYDNNSLRQKKLYLYYLQFGKCMYTGREIDLDRLLQNNDTYDIDHIYPRSKVIKDDSFDNLVLVLKNENAEKSNEYPVKKEIQEKMKSFWRFLKEKNFISDEKYKRLTGKDDFELRGFMARQLVNVRQTTKEVGKILQQIEPEIKIVYSKAEIASSFREMFDFIKVRELNDTHHAKDAYLNIVAGNVYNTKFTEKPYRYLQEIKENYDVKKIYNYDIKNAWDKENSLEIVKKNMKKNTVNITRFIKEEKGQLFDLNPIKKGETSNEIISIKPKLYNGKEEKLNEKYGYYKSLNPAYFLYVEHKEKNKRIKSFERVNLVDVNNIKDEKSLVKYLIENKKLVEPRLIKKVYKRQVILINDYPYSIVALDSNKLMDFENLKPLFLENKYEKILKNVIKFLEDNQGKSEENYKFIYLKKKDRYEKNETLESVKDRYNLEFNEMYDKFLEKLDSKDYKNYINNKKYKNLLDVKEKFIKLNLFDKAFTLKSFLDLFNRKTMADFSKVGLTKYLGKIQKISSNVLSKNELYLLEESVTGLFVKKIKL

SEQ ID NO: 447 - protein, 1367 aa, Fusobacterium sp.
MKKQQFSDYYLGFDIGTNSVGWCVTDFNYNVLRFNKKDMWGSRLFDEAKTAAERRVQRNSRRRLKRRKWRLNLLEEIFSDEILKIDSNFFRRLKESSLWLEDKSSKEKFTLFNDDNYKDYDFYKQYPTIFHLRNELIKNPEKKDIRLVYLALHSIFKSRGHFLFEGQNLKDIKNFETLYNNLMAFLEDNDIYKNIDSSYIGNLENIICDSKKGLKDKEKEFKEIFNSDKQLVGFFKLSVGSSVSLNDLFDTDEYKKGEVEKEKISFREQIYEDDKPIYYSILGEKIEFLDIAKSFYDFMVLNNILADSQYISEAKVKLYDEHKRDLKNLKYIIRKYNKENYDKLFKDKNESNYSAYIGLNKEKGKKEVIEKSRLKIDDFAKIIKGYLPKAEKIDEKDRSIFNEILDKIELKTILPKQRISDNGTLPYQIHEAELEKILENQAKYYDFLNHEENGISTKDKLLMTFKFRIPYYVGPLNSYHKNKGGNSWIVRKEEGKILPWNFEQKVDIEKSAEEFIKRMTNKCTYLNGEDVIPKDSFLYSEYIILNELNKVQVNDEFLNKEIKKKIIEDLFKKSKKISEKNFREYLLVNQITNKTVELKGVKDAFNSNYVSYIKFKDIFGDKLNLDIYKEISEKSILWKCLYGDDKKIFEKKIKSVYGDILTKDEIKKINSFKFNTWGRLSEKLLTEIEFIDLETGECYSSVMDALRRTNYNLMELLSSKFTLQENIDNENKEVSEFSYRDLVEESYVSPSLKRAILQTLKIYEEIRKITGRIPKKVFIEMARGGDETMKNKKIPARQEQLKKLYDSCGKDISNFSIDIKEMKNSLNSYDNNSLRQKKLYLYYLQFGKCMYTGKEIDLNRLLQNNDTYDIDHIYPRSKVIKDDSFDNLVLVLKNENAEKSNEYPLKKEIQEKMKSFWKFLKEKNFISDEKYKRLTGKDEFELRGFMARQLVNVRQTTKEAGKILQQIEPEIKIVYSKAEIASSFREMFDFIKVRELNDTHHAKDAYLNIVAGNVYNTKFTEKPYRYLQEIKENYDVKKIYNYDIKNAWDKEKSLEIVKKNMEKNTVNITRFIKEEKGQLFDLNPIRKGETSNEIIAIKPKFYEGSTEKLNEKYGYYKSLNPAYFIYVEHKEKNKIIRSFERVNLVDVNKIKDEKSLIKYLIENKGLIEPKVIKKVYKRQVILINNFPYSIVALDSNKLMDFENLKPLFLERKYEKILKNAIKFLEDNQGKTEEYYKFLYLKKKDRNEKNETIDSVKERYNIEFNEMYDKFLEKLDSKDYKNYINNKKYSELVNVKEKFIKLNLFDKAFTLKSFLDLFNRKTMADFSKVGLTKYLGKIQKISSNVLSKNELHLLEESVTGLFVKKIKL

SEQ ID NO: 448 - protein, 1391 aa, Galbibacter sp.
MKTILGLDLGTNSIGWALVKEAENENEVSDIIKLGVRVNPLTVDELTNFEGGKAYSNNAERTLKRGARRNLQRYKLRRENLIEILLKNGLINKDTALTEVGKETTHQTLKLRSKSANEKVSLEDLAKILLSINKKRGYKSSRKVNAEDDGVAIDGMEVAKLLYDENMTPGEYVLRLLESGKKHLPDFYRSDLQEEFNLVWKKQSEFYPLILTKELFFELHGKNKSQTWAICKEPLGIVGVKLKGSAKEQKFARYRLRKEALTQQIELEHLAIVLQDINNDSNKSSGYLGAISDRSKELFFNKETVGQYQYKQLQKDPNTSLKNQVFYRQDYLDEFEVIWRNQAKFYPQLTNELKQEIRDVVIFYQRKLKSQKNLISFCQFESTQQNYVEKETGKTKIRTIGRRVIPRSSPLFQEFKIWQSLNNLKFVNSESNQIIQFIELEDDVKKVVFDELNLRGDLKPNQVLKILSKYMKIGKLTQWKCNLEEIEGNRTNSALYNVFQMIAEEEGYGFNWGKKSALEIKSELKAIFSSIGINDSILDFDFSKKLDQQLSYQLWHLLYSAEEGNSKITEEDKFTYGNTGVALKKKLHLKFGFKPEYSTLISNLRFTSDYGNLSSKAISKILPFLRDGSDYSKACQYAGYNHSNSLSADELDNRELKPKLELLKKNSLRNPVVEKILNQMVNVVNQVIDNYGKPDEVRIELARELKKSAKERSQMTKNISDATRRNAEIKKYLSKEFGIPNPTKGDVIRYRLWEELASNGYKDLFRDKYIPKEKLFSNEIDIEHIIPKALLFDDSFSNKTLAFKVDNLKKADRTAFDFMSTDFSKDVDSYIGRIETLHKDGKISSSKYKKLMIPKSKLVDGFIERDLRNTQYIAKQARKMLLEVFKTVVPTTGKITDKLREDWDLINVMKELNFPKYKALGLTKKIERFDVGSEKIKSINVIEGWSKRNDHRHHAMDALAVAFTTHNHIQYLNYLNARKDIHHEMHGTIKSIENQIIGKDVMGKRRFIPPISDLRMKAKLQIESILISFKNKNKVVTWSVNKTKLKGKDNYNKRRQLTPRGQLHKETVYGKIKLIDPKPLKLNNKFTLVRASMIVDKVHREIVLQHLSKYDNNSEVAFDSKTIKIDPILIEGIGLKEVVCYEDVFKIRKKISGDNFKNEKHLEKVIDEKVKQILKDRVIKFQGNFKEAFSNLEENPIWLNKSKGIAVKSVAIKGVNNAESLHEGKDHFGDQILDKNKKQIPVDFVSTGNNHHVGIYEDKDGNLQERVVSFFEAVTRVNEGLPIIDKTYNSDIGWKFKFTMKQNEMFVFPSDDFDPNEFDLTDGKNAAKISPNLYRVQKIATKNYMFRHHLETVVTNDLEFTYKSIRSTGWLRNLVKVRINHLGEIVYVGEY

SEQ ID NO: 449 - protein, 1186 aa, Gardnerella vaginalis
MEGNISYAIGIDVGLNSVGLAAIRLDDYGEPIRILKAMSVIHDAGIDPNGAKESDTRKAISGVARRVRRLYRQRRRRLQKLDFLLQSLGWPVVENKDLDFSDSFIPWIFRAKLADEYIADEEQRKQMLSVAIRHIARHRGWRNPYQSIKSMMQETEYSEFYNELLKNIEKLAPGVGCEGSTPAQLVRDYLLSQQGKASRRLRITTGGRRKNHPHSLDPVLPRKLMQSDNMLEILNIFNVQHIDDKYVREQIINAVFYAESPRGSAENRVGKDAITGKGKRALKASLAFQKYRIISTISNLRIRENSKERCLTIEEKQNVYKLLTTSIDKSSKRKSAEAPLYTWIDVADCLGIERYKLRGVGSQIGDGESVGNRPPMLNSELAILYANNKSLGQSLITWWLASNRTQEDKEALIEILSNTVDIEAIHDNPEYQDKYGSAIAFIDSMNETEIAALENISLPDGRAAYSLETLDELNKQMLETDDDLFEARKKLFNLPNNWRPAEAPIAEPTGNPSVDRVLKIVHRFLISAKNRWGNPERINIEHVRSGFQSKKMANSYKELLDKRTEGKENLKAMMRNSLHLGTSDSISDADIRRYEAVQRQNGQCLYCGSEITYHTCELDHIVPRKGPGSTNTRENLVATCSSCNAQKCNTPFATWCEQSTYCKNHDISADSAINRVRAFIFPPNSYDKRGANQFKKEVIARLKQKVGDEAFDNRSIESVAWMANELHRRIDWYYNSQNYQTNNGISDISNKAQTNVGVYAGSLTAIARRMSGIDGKLEFFDGRRKTRFDRRHHAVDASVIAMMTPGIAQILAIKCNLRETQLLQGNKVVPGGIDWKEYPTANDQGYQQYANWSVRMNALLKLLNEEMRADRIAVVNSIRLRYSNSSVHQYEVNALLKLHVGDEIDSETIRRSSTPALYCALTRNPDYDVNNGFPENPGRTILLHNKKLNADDSITFFKAQAVQLFVREGSAKIGNSIHHLRIYEYFEKLKSGKIKKSYGMIRVFQNDLHRHIHEDLFSCDLPEQSISMRYADTKVAHAVQTGNANYLGYLVPGDEIIVDFSHITLSENIGKFVEFLNKIGADCTAYRHWVVVGTDTEKVLILKPSMISSEGIDKLYSNCERNNFDYSSYEKSINEILAGKGWRVSVNVLAQYKAATIRRNALGEVRWASRSHLPISWSWDTGENRE

SEQ ID NO: 450 - protein, 1186 aa, Gardnerella vaginalis
MEGNISYAIGIDVGLNSVGLAAIRLDNNGEPIRILKAMSVIHDAGIDPNGAKESDTRKAISGVARRVRRLYRQRRRRLQKLDFLLHSLGFPVVENKDLDFSDSFIPWIFRAKLADEYIADEKQRKQMLSVAIRHIARHRGWRNPYQSIKSMTQETEYSEFYNELLKNIEKFAPGVGCEGSTPAQLVRDYLLLQQGKASRRLRITTDEKRKNHPNSLNPILPRKLMQSDNMLEILNIFNVQHIDDKYVREQIINAVFYAKSPRGSAENRVGKDAITGKGKRALKASLAFQKYRIISTISNLRIRENSKERCLTIEEKQSVYKLLTTSTDESSKEKSAEAPLYTWIDVADCLGIERYKLRGVGSQIGDGESVGNRPPMLNSELAIIYANNKSLGKSLLTWWLDANRTQEDKEALIEILSNTVDIEAIHDNPEYQDKYGSAIAFIDSMDETEIAALENISLPDGRAAYSLETLDKLNKQMLETDDDLFEARKKLFNLPNNWRPSEAPIAEPTGNPSVDRVLKIVHRFLISAKNRWGNPERINIEHVRSGFKSKKMANSYKELLDKRTKGKENLKAMMRNSLHLGMSDSISDADIRRYEAVQRQNGQCLYCGSEITYHTCELDHIVPRKGPGSTNTRENLVATCSLCNAQKCNTPFSTWCEQSTYCKNHDISVDSAINRVRAFIFPPNSYDKRGANQFKKEVIARLKQKVGDEAFDNRSIESVAWMANELHRRIDWYYNSQNYQTNNGISDITNKAQTNVGVYAGSLTAIARRMSGIDGKLEFFDGRRKTRFDRRHHAVDASVIAMMTPGIAQILAIKCNLRETQLLQGNKVVPGGIDWKEYPTANDQGYQQYANWSVRMNALLKLLNEEMRADRIAVVNSIRLRYNNSSVHQYKVNALLKLHVGDEIDSGTIRRSSTPALYCALTRNPDYDVNNGLPENPNRAILLHDKKLNADDSITFFKAQAVQLFVREGSAEIGSSTHHLRIYEYFKKLKSGKIKKSYGMIRVFQNDLHRHIHEDLFSCDLPEQSISMRYADTEVAHAVQTGNSNYLGYLVPGDEIIVDFSHVKLSGNIGTFVEFLNKIGANCAAYNHWVVVGTDTEKVLILKPSMISSEGIDKLYSNCKRNNFDYSSYEKSINEILVGKGWRVSVNVLAKYNAETIRRNALGEVRWTSRSHLPISWSWNTGENRE

SEQ ID NO: 451 - protein, 1258 aa, Gemella haemolysans
MTEENPDIRKVFLAIHHILKNRGHFLLQGQSFKEGNLNNLIKELLNLDILHISIEITEENINKITEIALEKKTLTDKVNDLKKIYPKEKQLLEAFRLIFGGKTSLDKLFAIDEYKELDASVKSVSFKEKIYEEVRHDYEQVLSNYIELLDLAKLVYDSIILSDIKKEGKTLSESKVELYHKHREDLTKLKTLVKNDSKLSEDKKVELYSAIFKEDKDKGTNYVNYIRKSEEGKGCNYEDFKKFLVKELAKLEESSAKEEILRDLELELFLPLQRTKDNSVVPYQIHKEELVKILDNAAKYHKFLNEKDDSGYSIIEKVIQLLEFRIPYYVGPLNSSKKAKVDGFAWSVRNKGYENTPVTPWNYEKVIDESASAEKFITNLTNKCTYLKGEDVLPKSSLLYSEFALLNELNALKYDGNRISLEARNVIIEKLFKEQGKKVTKTSIKNLLKAEGYIDGKGEITGIDITVKNDLKSYRDFKKILGDKFNTEHVENIILWITLYGESRKLIKAKIEAVYGDIYSKEEIAKMSRLVYKDWGRFSRKLLTELVSKKLYNEETGECLNIIGAMRQNNILFMELLADRFDYSQQIIDYNKELQKEVTEITPEILDDLYVSPSVKRSIWQTVRIVEELKKIIGCAPAKIFVETTRSNQDKKKPTDSRKKQLELFYKAVKKDVKDLEKEIGSLNFDKLNERLSSVEPSKLKAKKLYLYYTQLGRCMYSGETIDITQLNTTAYDIDHIYPQSKVKDDSFTNTVLVKREYNAAKTDRYPLGSDIQTPSNRRFWKFLKEKGLITDEKYNRLVRTEEFSDEELTGFIARQLVETSQSVKAVAGILGELNPKTSICYSKAENVSSFRQNFGKIKEGNRKSDNTEQLIKVREINDYHHAKDAYLNVVVGNVYDTKFTRNVFNFIKDKKDGRKYSLNNVFYENVSNSNNVAWELNKTVHQVEKVMNNNNILVTRRTSEQKGGLFDATVYKAKVAAKAKEGVYYPLKTSDPVVNDVTKYGGFTKVKIAYYSIFEYTLVNKKGEEKITRIIPIPIYVSQNIKDDSTLLEFGKTQINIKSGEEVKDFKLKYRKLCIGDLVKINNFFNFIGGKTNDSFVYDGAVQVTLDTESERYIKTLSKYQNWKKENKDGELWESITKEKNTELYNLLVEKMNSGIFIKKKPNKFNELNSEEIRNNFSSISLEEQAKVLLEVLNLLTNKKSIFDLKSINITAARGKISFNLSNLSQFSIIEQSVAGFYEKEITIIGDKENDMENNNC

SEQ ID NO: 452 - protein, 1054 aa, Haemophilus parainfluenzae
MENKNLNYILGLDLGIASVGWAVVEIDEKENPLRLIDVGVRTFERAEVPKTGESLALSRRLARSARRLTQRRVARLKKAKRLLKSENILLSTDERLPHQVWQLRVEGLDHKLERQEWAAVLLHLIKHRGYLSQRKNESKSENKELGALLSGVDNNHKLLQQATYRSPAELAVKKFEVEEGHIRNQQGAYTHTFSRLDLLAEMELLFSRQQHFGNPFASEKLLENLTALLMWQKPALSGEAILKMLGKCTFEDEYKAAKNTYSAERFVWITKLNNLRIQENGLERALNDNERLALMEQPYDKNRLFYSQVRSILKLSDEAIFKGLRYSGEDKKAIETKAVLMEMKAYHQIRKVLEGNNLKAEWAELKANPTLLDEIGTAFSLYKTDEDISAYLAGKLSQPVLNALLENLSFDKFIQLSLKALYKLLPLMQQGLRYDEACREIYGDHYGKKTEENHHFLPQIPADEIRNPVVLRTLTQARKVINGVVRLYGSPARIHIETGREVGKSYKDRRELEKRQEENRKQRENAIKEFKEYFPHFAGEPKAKDILKMRLYKQQNAKCLYSGKPIELHRLLEKGYVEVDHALPFSRTWDDSFNNKVLVLANENQNKGNLTPFEWLDGKHNSERWRAFKALVETSAFPYAKKQRILSQKLDEKGFIERNLNDTRYVARFLCNFIADNMHLTGEGKRKVFASNGQITALLRSRWGLAKSREDNDRHHALDAVVVACSTVAMQQKITRFVRFEAGDVFTGERIDRETGEIIPLHFPTPWQFFKQEVEIRIFSDNPKLELENRLPDRPQANHEFVQPLFVSRMPTRKMTGQGHMETVKSAKRLNEGISVIKMPLTKLKLKDLELMVNREREKDLYDTLKARLEAFNDDPAKAFAEPFIKKGGAIVKSVRVEQIQKSGVLVREGNGVADNASMVRVDVFTKGGKYFLVPIYTWQVAKGILPNKAATQYKDEEDWEVMDNSATFKFSLHPNDLVKLVTKKKTILGYFNGLNRATGNIDIKEHDLDKSKGKQGIFEGVGIKLALSFEKYQVDELGKNIRLCKPSKRQPVR

SEQ ID NO: 453 - protein, 1052 aa, Haemophilus parainfluenzae]
MKNTSLNYVLGLDLGISSVGWAVVEIDEKENPLSLIDVGVRTFERAETQKGESLALARRLARSARRLTQRRVARLKKAKRLLKSENILLSTDECLPHQVWQLRVEGLERKLERQEWAAVLLHLIKHRGYLSQRKNESKSENKELGALLSGVANNHKLLQQTTYRTPAELAVKKFEVEEGHIRNQQGSYTHTFSRLDLLSEMELLFSRQQHFGNPFTSEKLLENLTALLMWQKPALSGDAILKMLGKCTFENEYKAAKHTYSAERFIWITKLNNLRIQENGLERALNDNERLALMKQPYEKAKLTYAQVRSILNLSDEAIFKGLRYSGEDKKTSETKTVLMEMKAYHQIRLALEKNDLKTEWAELKVNSSLLDEIGTAFSLYKTDEDISTCLAGKLSQPVLNALLENLNFDKFIQLSLKALHKILPLMQQGLRYDEACAEIYGDHYGKKTEENHLLLPQIPADEIRNPVVLRTLTQARKVINGVVRLYSSPARIHIETGREVGKSYQDRRELEKRQEENRKQREKAISEIKTLFPNFSGEPKAKDILKMRLYYQQNAKCLYSGKPLELHRLLEQGYVEIDHALPFSRTWDDSFNNKVLVLANENQNKGNLTPFEWLDGKNNSERWKAFKALVETSAFPYTKKQRILSQKLDEKGFIERNLNDTRYVARFLCNFIADNMHLTGEGKRKVFASNGQITALLRGRWGLAKSREDNDRHHALDAVVVACSTVSMQQKITRFVRFEEGNVFTGERIDRETGEIIPLHFPAPWKFFREEVEIRIFSDNPKLELENRLIARPQANHEFVQPLFVSRMPTRKMIGQGHMETIKSAKRLNEGLSVIKMLLTKLRLKDLESMVNREREKELYEALKARLEAFNDEPAKAFAEPFMKKGGAIVKSVRVEQVQKSGVLVRDGNGVADNASMVRVDVFTKGGKYFLVPIYTWQVAKGILPNKAVIQGKNEEDWEVMDDATFRFSLHQNDLVKLVTKKKTIFGYFNGLNRATGNIDIKEHDLEKSKVKDGIHQSIGIKLALSFEKYQVDELGKNIRLCKSSKRQAVR

SEQ ID NO: 454 - protein, 121 aa, Haemophilus pittmaniae
MLNRRYAAKITRFVRFEAGDVFTGERIDRETGEIIPLHFPTPWQFFKQEVEIRIFSDNPKLELENRLPDRPQANHEFVQPLFVSRMPTRKMTGQGHMETVKSAKRLNEGISVIKMPLTKLN

SEQ ID NO: 455 - protein, 203 aa, Haemophilus pittmaniae
MVNREREKDLYDALKARLEAFNDDPAKAFAEPFIKKGGAIVKSVRVEQVQKSGVLVREGNGVADNASMVRVDVFTKDGKYFLVPIYTWQVAKGILPNKAATQYKDEEDWEVMDNSAIFKFSLHPNDLVKLVTKKKTILGYFNGLDRATGNIAIKEHDLEKSKAKGGIHQGVGIKLALSFEKYQIDELGKNIRLCNPSKCQSVR

SEQ ID NO: 456 - protein, 1052 aa, Haemophilus sputorum
MKNTSLNYVLGLDLGISSVGWAVVEIDEKENPLSLIDVGVRTFERAETQKGESLALARRLARSARRLTQRRVARLKKAKRLLKSENILLSTDECLPHQVWQLRVEGLERKLERQEWAAVLLHLIKHRGYLSQRKNESKSENKELGALLSGVANNHKLLQQTTYRTPAELAVKKFEVEEGHIRNQQGSYTHTFSRLDLLSEMELLFSRQQHFGNPFTSEKLLENLTALLMWQKPALSGDAILKMLGKCTFENEYKAAKHTYSAERFIWITKLNNLRIQENGLERALNDNERLALMKQPYEKAKLTYAQVRSILNLSDEAIFKGLRYSGEDKKTSETKTVLMEMKAYHQIRLALEKNDLKTEWAELKVNSSLLDEIGTAFSLYKTDEDISTCLAGKLSQPVLNALLENLNFDKFIQLSLKALHKILPLMQQGLRYDEACAEIYGDHYGKKTEENHLLLPQIPADEIRNPVVLRTLTQARKVINGVVRLYSSPARIHIETGREVGKSYQDRRELEKRQEENRKQREKAISEIKTLFPNFSGEPKAKDILKMRLYYQQNAKCLYSGKPLELHRLLEQGYVEIDHALPFSRTWDDSFNNKVLVLANENQNKGNLTPFEWLDGKNNSERWKAFKALVETSAFPYTKKQRILSQKLDEKGFIERNLNDTRYVARFLCNFIADNMHLTGEGKRKVFASNGQITALLRGRWGLAKSREDNDRHHALDAVVVACSTVSMQQKITRFVRFEEGNVFTGERIDRETGEIIPLHFPAPWKFFREEVEIRIFSDNPKLELENRLIARPQANHEFVQPLFVSRMPTRKMTGQGHMETIKSAKRLNEGLSVIKMLLTKLRLKDLESMVNREREKELYEALKARLEAFNDEPAKAFAEPFMKKGGAIVKSVRVEQVQKSGVLVRDGNGVADNASMVRVDVFTKGGKYFLVPIYTWQVAKGILPNKAVIQGKNEEDWEVMDDATFRFSLHQNDLVKLVTKKKTIFGYFNGLNRATGNIDIKEHDLEKSKVKDGIHQSIGIKLALSFEKYQVDELGKNIRLCKSSKRQAVR

SEQ ID NO: 457 - protein, 1338 aa, Helcococcus kunzii
MQDYYLGLDIGTNSVGWAVTDENYNLLRKKGKDLWGVRLFKEAQPATERRGHRSSRRRTIRKSLRKQLLRELFEEEINAIDKDFFLRLDESKYWLEDKKIEGKYSLFNDENFTDKDYYEKFPTIFHLRKALIESDDKEDIRLYFLAINQMMKRRGHFLIDGKLSNVEDITPFKECIQNLINEELDTEIETEFYDKAIKIVSDYSLKKTEKKNLIKDLVKETDSIEDSKKIINIFNLLISGKSKVNGIFDDEEILEKIKEDNKEDFYLTSEKYEENLEYFSQLLDYRFELISSLKSIYDYIILQEVLKGKKYLSYAQVERYKNHKEDLRKLKQLIKKYDKNGKIYYQIFRDENFKKGYVAYLGYYKKNKKNVPVKKCDYDTFSKNIKSTLDKICDKEDPLYIELIDKIEKGGFLLKQIVSTNSVIPHQVHELELDKILENLEKNYPSFKEISDGVSKIDKIKMIFNFRIPYYVGPLNDYHKDKVNSNTWIVKNEGFENENIRPWNFSKIVDEHACEEEFIKRMINECSYIPGEKVLPKSSLLYSEYMVLNELNNLRVNGDKLNPKIKKEIVENIYKKERKVTLKKIRNFLIINNYVDSKVEFSGLSDGIKANMSSYIDFAEILDDNFDNNMVEDLIEQITIHVGNVKLLTEKISNKYPNLEKKQINKIVNLKFKDWARFSRKLLVGIEGTEKETGEINTIIGFLRETNENFMELMSNRYTFSEEISEIKKKYIPNKLSKQIVDDLYVSPAVKKMIWQVLNINDELIKVLGKQPKKIFIEMARGKEEKPEVKDSRKNKLIELYKNLGKEGKEWLNRIEDKTEADFRNRALYLYYTQMGRCMYTGEIIDIERLYDKELYDLDHIIPRKMKKDDSIHKNLVLVTRNSNQYEKKDNYPVPEVIKSRENVRHLWYALKKKGLITEEKYNRLTRINPLSDKELSEFIERQLVETRQTTKVVKDLFENYYTDSKIVTVKAGLVSELRRDFEVLKCREINDLNHAHDAFLNIIVGDVWSKKFTSNPYNFVKKNREKYTLNNIFTKNQKDLRGNEIWNCAEGKKRIIKTLNKPSVLFSVENFEQTGQLFDQNIIGKQDYKEKTSYVPIKGDERLQDISKYGGYRGISGAYFFIVEHTEKNKRVKTIESLPIYMKSYVEENGLLDFCTNEMKLVDPKIIVKKLNYKSEIIVDGFKYLISGKTENRLSLETNEYLYWNHTQTTDIKKILNINEKIELEKYNGDIESERENIIKYIQIILEKFKLKPFIKRRNLPNIEINFADYETEKLLQLLVNLIPLTTKYVSPVDLTVISGSKYAGKVLIPKKISNLNEVIFISKSITGIYESRRRII

SEQ ID NO: 458 - protein, 1023 aa, Helicobacter cinaedi
MKIYSFDIGVASIGWAFIENEVLQDCGIRIFTKAENPKNGASLALPRREARGVRKRLARRRGRLNTIKQLLCKEFGLQLEDYLSNDGELPKAYTASKANPLKSPYELRTLALSQKLDSKDLVRVILHIAKHRGYGNKHAKDSKDTESGKVKKAIEFNRKTLAEKGYRSVGEYLYREFFQQSRISQNNGATEFINVRNKAGNYEHCVAQDMLKEELESILNAQRQFGFSLKQDFENKLLTKIFEQRPLKSFADKVGNCCFIAGEKRTPKDSLSAIEFIALSRTINTLINLSKESGEIYNRAIILQIVESTLKKGEISYKELREIIRLDERLRFKDPRLDYSREIKEAEKVKFLEFKQLKGFKKALGESFTTLARSQLDEIAEHIALIKDRVKLNEKLESYALTKEQREALSNLSFSAHINLSLQALKQILPFMRGDNGEQCLDYDESVEKAGLKALSKDTLKGQMLPPLNEFEPYLSNPVVARALAEYRKVLNALLKQYGSPHKIHIEYAREAKLSSTERQKYEKEQKDNYAANQAAHKKCQELGLEPSSTNLLKLKLWQEQGGLCLYSGAKITISYLQDPTALQVDHIYPYSRSFDDSYMNKCLVLTKANQEKGNRTPFEAFGTDSAKWGVITTLAQKLPHKKRRRILNTAFNDKEAGFKLRNLNDTSYIARLVADYTETYLEFLPLVESENTTLGKGQKGSKKHIAIVNGALTSTMRYYLGFASKDRDNHLHHALDAVIIGFMNDSVIKAFSDFKKTQETSKAAYYAHTLSKQEYKKQRAFIQLPSGENFRASVLEKVESVFVSKPPRKRVRGALHEATFYSPNDPKLLKNYGGTKGVERALALGKMRKVGAKIVSNGAMVRVDIFRHKSSGKFYGVPVYTMDFALGILPNKAVVVGKDKNGVIKDWLEMDSSYEFIFSLYKDDLLLVQKKEMAEPELCYFMSFNSSIAQISVAKHDNNFSTLTKNQKLLFSNATQEDVSGKSIGIQNLQVFEKWQVSVLGEVKRTQSYPRENISLASKAKK

SEQ ID NO: 459 - protein, 1023 aa, Helicobacter cinaedi
MKIYSFDIGVASIGWAFIENEVLQDCGIRIFTKAENPKNGASLALPRREARGVRKRLARRRGRLNTIKQLLCKEFGLQLEDYLSNDGELPKAYTASKANPLKSPYELRTLALSQKLDSKDLVRVILHIAKHRGYGNKHAKDSKDTESGKVKKAIEFNRKTLAEKGYRSVGEYLYREFFQQSRISQNNGATEFINVRNKAGNYEHCVAQDMLKEELESILNAQRQFGFSLKQDFESKLLTKIFEQRPLKSFADKVGNCCFIAGEKRAPKDSPSAIEFIALSRTINTLINLSKESGEIYNRAIILQIVESTLKKGEISYKELREIIRLDERLRFKDPRLDYSREIKEAEKVKFLEFKQLKGFKKALGESFTTLAISQLDEIAEHIALIKDRVKLNEKLESYALTKEQREALSNLSFSAHINLSLQALKQILPFMRGDNGEQCLDYDESVEKAGLKALSKDTLKGQMLPPLNEFEPYLSNPVVARALAEYRKVLNVLLKQYGSPHKIHIEYAREAKLSSTERQKYEKEQKDNYAANQAAHKKCQELGLEPSSTNLLKLKLWQEQGGLCLYSGAKITISYLQDPTALQVDHIYPYSRSFDDSYMNKCLVLTKANQEKGNRTPFEAFGTDSAKWGVITTLAQKLPHKKRRRILNTAFNDKEAGFKLRNLNDTSYIARLVADYTETYLEFLPLVESENTTLSKGQKGSKKHIAIVNGVLTSTMRYYLGFASKDRDNHLHHALDAVIIGFMNDSVIKAFSDFKKTQETSKAAYYAHTLSKQEYKKQRAFIQLPSGENFRVSVLEKVESVFVSKPPRKRVRGALHEATFYSPNDPKLLKNYGGTKGVERALALGKMRKVGAKIVSNGAMVRVDIFRHKSSGKFYGVPVYTMDFALGILPNKAVVVGKDQNGVIKDWLEMDSSYEFIFSLYKDDVILVQKKEMQRPELCYFVSFDTSGASIKVAKHDNNFSTLTENQKLLFSNATKEEVVGKSIGIQNLKVFEKWQVSVLGEVKRTQSYPRENISLASKAKK

SEQ ID NO: 460 - protein, 344 aa, Helicobacter pullorum
MKILGFDIGIASIGWAFVENGELKDCGVRIFTKAENPKTGDSLAMPRREARSVRRRLARRKGRLETLKRLLAKEWDLCYEDYIAADGELPKAFMGKNLTNPYVLRYEALQRLLSKEELVRVVLHIAKHRGYGNKNAKITKSEESKREQGKILSALATNASVIARYRTVGEYFYKEFCEVIKNPQGLNTNENCTQPKVRVLKPIRNKGGEYTNCILQEDLQRELRCIFEHQKGFGFSITQEFQDKILKIAFYQRSLKDFSHLVGKCTFYPDEPRAPKFSLSAIEFITKAKAINLLASIAKESGEVWDKEQWRERLDSVFSAVCERGINTIPSSSHFLNIFDILYL

SEQ ID NO: 461 - protein, 1688 aa, Ignavibacterium album
MEFKKVLGLDIGTNSIGCALLSLPKSIQDYGKGGRLEWLTSRVIPLDADYMKAFIDGKNGLPQVITPAGKRRQKRGSRRLKHRYKLRRSRLIRVFKTLNWLPEDFPLDNPKRIKETISTEGKFSFRISDYVPISDESYREFYREFGYPENEIEQVIEEINFRRKTKGKNKNPMIKLLPEDWVVYYLRKKALIKPTTKEELIRIIYLFNQRRGFKSSRKDLTETAILDYDEFAKRLAEKEKYSAENYETKFVSITKVKEVVELKTDGRKGKKRFKVILEDSRIEPYEIERKEKPDWEGKEYTFLVTQKLEKGKFKQNKPDLPKEEDWALCTTALDNRMGSKHPGEFFFDELLKAFKEKRGYKIRQYPVNRWRYKKELEFIWTKQCQLNPELNNLNINKEILRKLATVLYPSQSKFFGPKIKEFENSDVLHIISEDIIYYQRDLKSQKSLISECRYEKRKGIDGEIYGLKCIPKSSPLYQEFRIWQDIHNIKVIRKESEVNGKKKINIDETQLYINENIKEKLFELFNSKDSLSEKDILELISLNIINSGIKISKKEEETTHRINLFANRKELKGNETKSRYRKVFKKLGFDGEYILNHPSKLNRLWHSDYSNDYADKEKTEKSILSSLGWKNRNGKWEKSKNYDVFNLPLEVAKAIANLPPLKKEYGSYSALAIRKMLVVMRDGKYWQHPDQIAKDQENTSLMLFDKNLIQLTNNQRKVLNKYLLTLAEVQKRSTLIKQKLNEIEHNPYKLELVSDQDLEKQVLKSFLEKKNESDYLKGLKTYQAGYLIYGKHSEKDVPIVNSPDELGEYIRKKLPNNSLRNPIVEQVIRETIFIVRDVWKSFGIIDEIHIELGRELKNNSEERKKTSESQEKNFQEKERARKLLKELLNSSNFEHYDENGNKIFSSFTVNPNPDSPLDIEKFRIWKNQSGLTDEELNKKLKDEKIPTEIEVKKYILWLTQKCRSPYTGKIIPLSKLFDSNVYEIEHIIPRSKMKNDSTNNLVICELGVNKAKGDRLAANFISESNGKCKFGEVEYTLLKYGDYLQYCKDTFKYQKAKYKNLLATEPPEDFIERQINDTRYIGRKLAELLTPVVKDSKNIIFTIGSITSELKITWGLNGVWKDILRPRFKRLESIINKKLIFQDEDDPNKYHFDLSINPQLDKEGLKRLDHRHHALDATIIAATTREHVRYLNSLNAADNDEEKREYFLSLCNHKIRDFKLPWENFTSEVKSKLLSCVVSYKESKPILSDPFNKYLKWEYKNGKWQKVFAIQIKNDRWKAVRRSMFKEPIGTVWIKKIKEVSLKEAIKIQAIWEEVKNDPVRKKKEKYIYDDYAQKVIAKIVQELGLSSSMRKQDDEKLNKFINEAKVSAGVNKNLNTTNKTIYNLEGRFYEKIKVAEYVLYKAKRMPLNKKEYIEKLSLQKMFNDLPNFILEKSILDNYPEILKELESDNKYIIEPHKKNNPVNRLLLEHILEYHNNPKEAFSTEGLEKLNKKAINKIGKPIKYITRLDGDINEEEIFRGAVFETDKGSNVYFVMYENNQTKDREFLKPNPSISVLKAIEHKNKIDFFAPNRLGFSRIILSPGDLVYVPTNDQYVLIKDNSSNETIINWDDNEFISNRIYQVKKFTGNSCYFLKNDIASLILSYSASNGVGEFGSQNISEYSVDDPPIRIKDVCIKIRVDRLGNVRPL

SEQ ID NO: 462 - protein, 1354 aa, Indibacter alkaliphilus
MKKILGLDLGTTSIGWAFIKEPEKDVVGSEIVDMGVRIVPLSSDEENDFAKGNTISINADRTLKRGARRNLQRFKQRRNALLETFKEKNLIPSNFQYAEDGPSSTFSTLKLRDKAAKEKIELDDFVKVLLQINKKRGYKSSRKAMSEEDEGTAIDSMGIAKELYENDLTPGQWVYEALKNGRKNVPDFYRSDLQEEFKKIVNYQSEFYPDILNTSFVEDWMGKASTPTKQYFNKRGVQLAENKGKREERRLQEYKWRAEAVNFKIDLSEIALILSQINSQISNSSGYLGAISDRSKELYFKNLTVGQYLYQQVKKNPHTRLKGQVFYRQDYLDEFEKIWSVQSSFYPQLNDELKQEVRDVTIFFQRRLKSQKHLISNCEFEEHHKVVPKSHPIFQEFRIWQNLNNLTLIKKDNLNEKCELALEDKTALANELAFKKELSVKDALKVLGLKPSDWEFNFTKIEGNRTNHAFFEAFAKIIELEDGEPIDLGNLKADDILDQFSEAFLRIGIDTELLQVNSDIEGAEYEKQSYIQFWHLLYSSEDDQKLKQNLIRKFGFKPEHAKILASISLQDDHASLSSRAIKKILPHLQSGLIYDKACTYAGYNHSSSFTKDENEKRELRAELELLKKNSLRNPVVEKILNQMINVVNAILKDPNLGRPDEIRVEMARELKANAEQRKNMTSNIASATRDHEKYREILKKEFGLKRVTKNDLLRYKLWLETDGISLYTGKPIEASKLFSKEYDIEHIIPKARLFDDSFSNKTICERQLNIDKANVTAFSFLQNKLSADEFEQYQSRVKSLYGKLSKAKIQKLLMANDKIPEDFIARQLQETRYISKKAKEILFEITMRVSVTTGTITDKLREDWGLVEIMKELNWEKYDKLGLTYTIEGKHGERLNKIKDWNKRNDHRHHAMDALTVALTKPAYIQYLNNLNAKAIGNKKGTEIFAIEQKYLKRENGKLCFIPPIENIRAEAKKHLSKILVSYKAKNKVVTINKNKTKKKAGFNEQTALTPRGQLHKETVYGKSFHYSTKFEKIGASFDAQKINTVAKKEEREALLKRLAENGNDPKKAFTGKNSLNKMPIYLDLGKNIKLSEKVKTVVLEQNYTIRKNIDPDLKVDKVIDVGIKRILESRLEEFGGNAKLAFSNLEENPIWLNKEKGIPIKRVKISGVSNVESLHVKKDHFGEKILDEEGNEIPVDFVSTGNNHHVAIYEDEDGNLQDEVVNFYEAVIRRNQGESIIKYRHEEGWNFLYSIKQNEFFVFPSQDFNPNDFDLLDPKNYDLISPNLYRAQKFSKVMYGNSAVRDYVFRHHLETVLNDVKELKDVAYKQLKSLQYLNGIKKVRLNHLGQIIQVGEY

SEQ ID NO: 463 - protein, 1397 aa, Joostella marina
MKKVLGLDLGTNSIGWALVNEATKEEKKEGKSSEIIKLGVRVNPLTVDEKTNFEKGRPLSTNADRTLKRSARRNLQRYKLRRRNLIEILIKNGFITKDTPLTETGKDTTHQTLKLRAKSAKEKVDLKDFAKILLTINKKRGYKSSRKVNSDEDGLAIDGMAVAKHLYEQNLTPGQYVLNLLQKNKKYVPDFYRSDLQEEFKNIWNNQKTYYFDILTDTLFEELKDKNKSQTWAICKKPFDIAGIKQIGKASDKRLERYKWRTEGLTQKLNLEYLAIALQEINNDINKSSGYLGAISDRSKELFFNKETVGENLYRQLVKTPHTSLRNQVFYRQDYLDEFETIWETQAKFYPQLTHTLKEEIRDVIIFYQRKLKSQKSLISFCQFESWEQTYIEKETGKSKTRTVGRKVIPKSSPLFQEFKIWQNLNSLEFRNSDEGEIIEFIKLDEDIRQTVFEELNLRGNLKPNDVLKILGNYISLGKVSQWKCNFEEIEGNRTNAALYNVYQIIAENEGYGFDWAKKTASEINKELKNIFPQLGIDASILDFDFTQANFDKQTSYQLWHLLYSAEEDFKISEEDKVLYGNSSVSLKKKLHQKYGFKPEYTKLLTNISLQPDYGNLSAKAICNILPYLKENNVYSEACDLTGYNHSNFLTAEEQAKRPLKPILELLKKNSLRNPVVEKILNQMVNVVNQVIETYGKPDEIRIELTRELKKSAKERANMTKSIADATRRNDDYRKTIIKEFGIPNPTKSDVVRYRLWQELASRGYKDIFTDTEIKPQELFSNKIDIEHIIPKALLFDDSFSNKTLAFKKDNLKKANRTAYDFIANDYAPNLENYIERVESLHKDRKITRAKRNKLLMLQSKLPDGFIERDLRNSQYITKEAKKMLYEVCRTVVSTSGSITDKLREDWDLINVMKELNFPKYKALGLTEKIERYDIGAEKMKEVEIIEDWNKRNDHRHHAIDALTVAFSTHSHIQYLNHLNARRDEGHKKHAAIIAIESTITEKEGNKKRRFIAPLPNFRLQAKEHIESILVSFKNKNKVVTNNINKTKRIKKDKFNTKVQLTPRGQLHKETIYGKIKQPLEKHIKLNKSFTLEQAKLIIDKRQREKVLNHLEKYAHNSDIAFNSKTLKKNPLLISDEPLKEVLCFEEVFTIRKDISYDNFKNEKQLDKVIDEKVKQALKERINQYNGDFREAFSDIERNPIWLNKAKGICVKRATIKGVSNAEPLHTAKNHLGEEVLTENKEQIPVDYVSTGNNHHVAIYEDEDGNLQEKVVSFYEAVIRVNEGLPIIDKEYNKSLGWTFKFTMKQNEMFVFPSEDFNPTEIDLLDQKNASLISPNLFRVQKFTIKDYFFRHHLETTVENNNTLKNTTWRREGLSGIYGIIKIRLNHLGEIVQVGEY

SEQ ID NO: 464 - protein, 1060 aa, Kingella kingae
MAAKSLNYILGLDLGIASCGWAVVEMDEQENPLRLIDVGVRTFEEAENPKDGSSLAETRRLARAQRRLISRRANRMNKLCRLLKQENVLQANDYDEKGLIIGLPNQAWELRAQGLDRKLEPKEWAAVLIHLVKHRGYLSQRKNESQTADKELGALLSGMNHNHQLLQSQSNQYRTPAELAIKQFATQDGHIRNQRGAYTHTFNRLDLQNELNQLFDAQTRLGNPHVSGSLKTAINDLLMNQKAALSGDAILEMLGRCTFEPSEYKAAKNTYSAERFVWLGKLTNLRIQDNGLESALSREQRELLLNEPYNKTKLTYQQVRKLLRLPETAFFKGLRYGKDNAESATFMEMKSYHAIRKSLENKSLKSEWEKLKTQPKLLDLIGTAFSIYKTDDEIAGCLKNQLPENVIIALQGQLNFSNFMELSLKALEKLLPLMEQGLRYDEACTQIYGNRHEKIADKTEKFLPNIPADKLRNPVVLRTLTQARKVINAIIRRYGSPARVHIETGREVGKSFSDRDKLKKQQEENQEQRRRAIDEWKQFFPNAAHEPKAVDILKLRLYQLQQGKCLYSGLPIDVRRLPEKGYVEIDHALPFSRTWDDSFNNKILVLASENQNKGNQTPYEYLRGADNSESWRLFVENVQNCQFSPNKKQKIMAKQLDEKGFLERNLNDTRYVSRFLCQFISEHLHLTGKGKKRVFASNGQITALLRGRWGLSKNREENDRHHAVDAVVVACSTVAMQQKITQFVRYQKGNVFTGERIDKETGEVISIHFPTPWEHFREEVMIRVFDDNPLRTLPEKLPNRPEALHEYVMPLFVSRMPTRKMTGQGHKETIKSAKRLDEKISVLRVPLTQLKLNDLENMVNREREPALYEALKARLEQFKNDPAKAFAEPFFKQGGQQVKAVRVEIVQKSGMLLRKINGVADNGSMVRVDVFEKSGKFYLVPIYAWQVAEGILPNYAVVAHKDESDWILMDESYHFKFALYKNDLLEVQTKKGGIMGYFASLDRATGAITIREHDRDKKKCKDGEHRSIGVKMASSFKKLQVDELGKNIHETRSRKRPNIG

SEQ ID NO: 465 - protein, 1314 aa, Lactobacillus animalis
MLKKDYSIGLDIGTNSVGHAVVTDDYKVPTKKMKVFGDTSKKTIKKNMLGVLLFNEGQTAADTRLKRGTRRRYTRRKNRLRYLQEIFAPELAKVDPNFLYRLEESSLVAEDKKYDVYPIFGKREEELLYHDTYKTIYHLRSALANNDQPADLRLVYLALAHIIKYRGNFLLEGEIDLRTTDINKVFAEFSETLNENSDENLGKLDVADIFKNNTFSKTKKSEELLKLSGAKKNQLAHQLFKMMVGNMGSFKKVLGTDEEHKLSFGKDTYEDDLNDLLAEAGDQYLDIFVAAKKVYDAAILASILDVKDTQTKTVFSQAMIERYEEHQKDLIELKRVFKKYLPEKCHDFFSEPKISGYAGYIDGKVSEEDFYKYTKKTLKGIPETEEILQKIDANNYLRKQRTFDNGAIPHQVHLKELVAIVENQGKYYPFLRENKDKFEKILNFRIPYYVGPLARGNSKFAWLTRAGEGKITPYNFDEMIDKETSAEDFIKHMTINDLYLPTEPVLPKHSLLYERYTIFNELAGVRYVTENGEAKYFDAQTKRSIFELFKLDRKVSEKMVIKHLKVVMPAIRIQALKGLDNGKFNASYGTYKDLVDMGVAPELLNDEVNSEKWEDIIKTLTIFEGRKLIKRRLENYRDFLGEDILRKLSRKKYTGWGRLSAKLLDGIYDKKTHKTILDCLMTEDYSQNFMQLINDDNYSFKETIKNAQVIEKEETLAKTVQELPGSPAIKKGILQSLEIVDEIIKVMGYKPKSIVVEMARETQKTHGTRKREDRVQQIVENLKDANELPEKLPSNAELSDERKYLYCLQNGRDMYTGAPLDYDHLQFYDVDHIIPQSFLKDDSIENKVLTIKKENVRKTNGLPSEAVIQKMGSFWKKLLDAGAMTNKKYDNLRRNLHGGLNEKLKERFIERQLVETRQITKYVAQLLDQRLNYDGNGVELDEKIAIVTLKAQLASQFRSEFKLRKVRALNNLHHAHDAYLNAIVANLIMAKYPELEPEFVYGKYRKAKFKGLGKATAKNTLYANVLYFLKENEVYPFWDKARDLPTIKRYLYRAQVNKVRKAERQIGGFSDEMLVPKSDSGKLLPRKEGLDPVKYGGYAKAVESYAVLITADEVKKGKTKKVKTLVNIPIIDSKKYEADPTAYLASRGYTNVTNSFILPKYSLLEDPEGRRRYLASFKEFQKANELILPQHLVELLYWVNAKDGEQKLEDHKAEFKELFDKIMEFADKYVVAPKNSEKIRRLYEENQDATPMELGKNFVELLRYTADGAASDFKFFGENIPRKRYNSAGSLLNGTLIYQSKTGLYETRIDLGKL

SEQ ID NO: 466 - protein, 1371 aa, Lactobacillus buchneri
MKVNNYHIGLDIGTSSIGWVAIGKDGKPLRVKGKTAIGARLFQEGNPAADRRMFRTTRRRLSRRKWRLKLLEEIFDPYITPVDSTFFARLKQSNLSPKDSRKEFKGSMLFPDLTDMQYHKNYPTIYHLRHALMTQDKKFDIRMVYLAIHHIVKYRGNFLNSTPVDSFKASKVDFVDQFKKLNELYAAINPEESFKINLANSEDIGHQFLDPSIRKFDKKKQIPKIVPVMMNDKVTDRLNGKIASEIIHAILGYKAKLDVVLQCTPVDSKPWALKFDDEDIDAKLEKILPEMDENQQSIVAILQNLYSQVTLNQIVPNGMSLSESMIEKYNDHHDHLKLYKKLIDQLADPKKKAVLKKAYSQYVGDDGKVIEQAEFWSSVKKNLDDSELSKQIMDLIDAEKFMPKQRTSQNGVIPHQLHQRELDEIIEHQSKYYPWLVEINPNKHDLHLAKYKIEQLVAFRVPYYVGPMITPKDQAESAETVFSWMERKGTETGQITPWNFDEKVDRKASANRFIKRMTTKDTYLIGEDVLPDESLLYEKFKVLNELNMVRVNGKLLKVADKQAIFQDLFENYKHVSVKKLQNYIKAKTGLPSDPEISGLSDPEHFNNSLGTYNDFKKLFGSKVDEPDLQDDFEKIVEWSTVFEDKKILREKLNEITWLSDQQKDVLESSRYQGWGRLSKKLLTGIVNDQGERIIDKLWNTNKNFMQIQSDDDFAKRIHEANADQMQAVDVEDVLADAYTSPQNKKAIRQVVKVVDDIQKAMGGVAPKYISIEFTRSEDRNPRRTISRQRQLENTLKDTAKSLAKSINPELLSELDNAAKSKKGLTDRLYLYFTQLGKDIYTGEPINIDELNKYDIDHILPQAFIKDNSLDNRVLVLTAVNNGKSDNVPLRMFGAKMGHFWKQLAEAGLISKRKLKNLQTDPDTISKYAMHGFIRRQLVETSQVIKLVANILGDKYRNDDTKIIEITARMNHQMRDEFGFIKNREINDYHHAFDAYLTAFLGRYLYHRYIKLRPYFVYGDFKKFREDKVTMRNFNFLHDLTDDTQEKIADAETGEVIWDRENSIQQLKDVYHYKFMLISHEVYTLRGAMFNQTVYPASDAGKRKLIPVKADRPVNVYGGYSGSADAYMAIVRIHNKKGDKYRVVGVPMRALDRLDAAKNVSDADFDRALKDVLAPQLTKTKKSRKTGEITQVIEDFEIVLGKVMYRQLMIDGDKKFMLGSSTYQYNAKQLVLSDQSVKTLASKGRLDPLQESMDYNNVYTEILDKVNQYFSLYDMNKFRHKLNLGFSKFISFPNHNVLDGNTKVSSGKREILQEILNGLHANPTFGNLKDVGITTPFGQLQQPNGILLSDETKIRYQSPTGLFERTVSLKDL

SEQ ID NO: 467 - protein, 315 aa, Lactobacillus casei
MFKDYLKQLEDDGTAKAIRQLYDRYIDGDDAKPFVREDFVKALTKEVTAHPNAKSPELLERLAQPDFMLKQRNKANGAIPVQMQQRELDQIIKNQSVYYDWLAAPNPVEKHRKSMPYQLDELLNFRIPYYVGPLVTAKEQKAARGGVFAWMVRKDPDGNITPYNFDEKVDREASANTFIQRMKTTDTYLIGEDVLPKQSLLYQSYEVLNELNNVRVNDNKLSFDQKQQVLGELFERHNTVTIKQFVDNLLAHGDYDRIPEVRGLADEKRFLSSLSTYNQLKGILHEAIDDSDKQTDMVDCKINPNAVRTKKISFL

SEQ ID NO: 468 - protein, 236 aa, Lactobacillus casei
MFKDYLKQLEDDGTAKAIRQLYDRYIDGDDAKPFVREDFVKALTKEVTAHPNAKSPELLERLAQPDFMLKQRNKANGAIPVQMQQRELDQIIKNQSVYYDWLAAPNPVEKHRKSMPYQLDELLNFRIPYYVGPLVTAKEQKAARGGVFAWMVRKDPDGNITPYNFDEKVDREASANTFIQRMKTTDTYLIGEDVLPKQSLLYQSYEVLNELNNVRVNDNKLSSSIFKSSATMITNS

SEQ ID NO: 469 - protein, 1389 aa, Lactobacillus casei
MIIRTYELKTITTIAILKMFQLLTGGLSMTKLGKPYGIGVDIGSNSIGFAAVDENSHLIRLKGKTVIGARLFEEGKAAADRRASRTTRRRLSRNRWRLSFLRDFFESHITPTGPNFFMRQKYSEISPKDKARYKYEKRLFNDRTDAEFYQQYPTMYHLRNRLLTDPSKADVREIYFAIHHILKSRGHFLTSGYAKDFNTNKVALNEIFPALQDAYAQVYPDLDITFDENKVNEFKTVLLNEKATPSDTQRALVNLLLAEDGDKDILKQQKQVLTEFAKAVVGLKTKLNVALGTEVDSSEATVWNFSLGQLDDKWAGIESAMTDEGTEILDQIRDLYRARLLNGIVPAGKTLSQAKVDDYAQHHEDLELFKDYLKQLEDDGTAKAIRQLYDRYIDGDDAKPFVREDFVKALTKEVTAHPNAKSPELLERLAQPDFMLKQRNKANGAIPVQMQQRELDQIIKNQSVYYDWLAAPNPVEKHRKSMPYQLDELLNFRIPYYVGPLVTAKEQKAAQGGVFAWMVRKDPDGNITPYNFDEKVDREASANTFIQRMKTTDTYLIGEDVLPKQSLLYQRYEVLNELNNVRVNNEKLSIEQKQQVIRELFERHNSVTIKQFAENLRAHGDYAHIPEIRGLADEKRFLSSLSTYRQLKSLLPDAIDDPAKQADIENIIAWSTVFEDAAIFKTKLKEINWLDSQTITKLSNIRYRGWGQFSHKFLNGLTLGNGHTIIQELFLSNNNLMQILTDETLQKKMTELNADKLKAANINDAIDDAYTSPSNKKALRQVLRVIEDIKRAADGQDPSWLYVETADGGGTPGKRTRARQHQLQEIYANAAHELIDSAVRGELEDKIADKADFNDRLVLYFMQGGRDIYTGTPLNIDQLSSYDIDHILPQSLIKDNSLDNRVLVHAIINREKNATFASTIYAQKMNATWRQWHEAGLISGRKLRNLQMRPDQIDKYASGFVARQLVETRQIIKLTEQIVAAQYPETKIIAVKAGLSHQLREELEFPKNRDVNHYHHAFDAFLAARIGTYLLKRFPNLQAFFTYGKFKKADVKKLRGFNFIRDITHAEDKIVVKDTGEVIWDKKRDVDELDRIYNFKRMLITHEVHFEKADLFKQTVYGAKDSKEAGGKKQLISKKKGYPVDIYGGYTQETGSYLSVVRLTKKAMYAVVKVSTRDAAKLAVAKSISEQKENETLNDIIDEKLSKISKNGKITHELFEVVLPRVGQKTLFKNSKYNLFLVNSDTYMHNYQELWMPREYQKMWKDISLSKYGDAQTEDQLDQIFGFIVSQVNSYFNLYDINQFRKKLNDAADKFATLPMRDTDDMQGKIATIGQLLIGLQANAARSDLRNLDIKTPLGLLQIPNGISLDSDTSVVYQSPTGLLEREVHLSDL

SEQ ID NO: 470 - protein, 412 aa, Lactobacillus casei
MIKDNSLDNRVLVHPLVNREKDTIFASTRFAKQTNGMWRQWHAAGLISSRKLRNLQMRPDEIDKYASGFVARQLVETRQIIKLTEQIVADQYPDTKIIAVKAGLSSQLRKELDFPKNREVNHYHHAFDAFLAARIGTYLLKRYPNLEPFFTYGKFKKTEVKKLKSFNFIRDMTHAKDKIVAKETGEIVWDNASDINELDRIYNFKRMLITHEVRFETASLFKQTLYAAKNPKNRGGSRQLIPKKKGYLVDIYGGYTQETGSYLSVVRLTKKAMYAVVKVSTRDAAKLAVAKSISEQKENETLKKIIDGKLSKTSKKGKTTHQLFEIVLPRVGQKTLFKNSKYNQFLVNSDTYMHNYQELWMPREYQRMWKDILLSNHGDAQIEGQLDQIFKFIVSQVNSYFNLYDINQFRKK

SEQ ID NO: 471 - protein, 234 aa, Lactobacillus casei
MKVTKKTETIFKVVKIATSQVAALNKARSRSTAEELSVLTELLKPKFSKVGKNGKITDTPFEVVLPRVPREQLFYNAKYGFFMVNSDTMFHNFQEIWVSRSDQKILQQIRKAKIDYPNVDQDLDNLFHNLADQIVKYFDLYSIAGFKEKISQSQNTFNDLAVDDTDQSVGKITVINELLKGAQANGMTGSLKVLKISTPFGFTQDKSGVLTKDSSIIYQSPTGLFERSVRLTDL

SEQ ID NO: 472 - protein, 566 aa, Lactobacillus casei
MQILTDEVLKQKIAELNAHELKASGIYAAIDDAYTSPSNKKALRQVLSVIDDITNAAGQAPNWLYIETADGDGVPGKRTNSRQRKIQEIYVNAAQELITSSVRGELEDKIASRADFTDRLVLYFMQGGRDIYTGEPLNIDNLSSYDIDHILPQSLIKDNSLDNRVLVHPLVNREKDTIFASTRFAKQMNGMWRQWHAAGLISSRKLRNLQMRPDEIDKYASGFVARQLVETRQIIKLTEQIVADQYPDAKIIAVKAGLSSQLRKELDFPKNREVNHYHHAFDAFLAARIGTYLLKRYPNLEPFFTYGKFKKTEVKKLKSFNFIRDMTHAKDKIVAKETGEIVWDNASDINELDRIYNFKRMLITHEVRFETASLFKQTLYAAKNSKNRGGSRQLIPKKKGYLVDIYGGYTQETGSYLSVVRLTKKAMYAVVKVSTRDAAKLAVAKSISEQKENETLKKIIDGKLSKTSKKGKTTHQLFEIVLPRVGQKTLFKNSKYNQFLVNSDTYMHNYQELWMPREYQRMWKDILLSNHGDAQLEGQLDQIFKFIVSQVNSYFNLYDINQFRKK

SEQ ID NO: 473 - protein, 1363 aa, Lactobacillus casei
MTKLGKPYGIGVDIGSNSIGFAAVDENSHLIRLKGKTVIGARLFEEGKAAADRRASRTTRRRLSRNRWRLSFLRDFFESHITPTDPNFFMRQKYSEISPKDKARYKYEKRLFNDRTDAEFYQQYPTMYHLRNRLLTDPSKADVREIYFAIHHILKSRGHFLTSGYAKDFNTNKVALNEIFPALQDAYAQVYPDLDITFDENKVNEFKTVLLDEKATPSDTQRALVNLLLAEDGDKDILKQQKQVLTEFAKAVVGLKMKLNVALGTEVDSSEATAWNFSLGQLDDKWAGIESAMTDEGTEILDQIRDLYRARLLNGIVPAGKTLSQAKVDDYEQHHEDLELFKDYLKQLEDDGMAKVIRQLYDRYIDGDDAKPFVREDFVKALTKEVTAHPNAKSPELLERLVQPDFMLKQRNKANGAIPVQMQQRELDQIIKNQSVYYDWLAAPNPVEKHRQSMPYQLDELLNFRIPYYVGPLVTAKEQKAAQGGVFAWMVRKDPDGNITPYNFDEKVDREASANTFIQRMKTTDTYLIGEDVLPKQSLLYQSYEVLNELNNVRVNDNKLSFDQKQQVLGELFERHNTVTIKQFVDNLLAHGDYDRIPEVRGLADEKRFLSSLSTYNQLKGILHEAIDDSDKQTDIEKIIAWSTIFEDKAIFKTKLNEISWLTAGMINSLANIRYRGWGQFSHKLLNELTLSTGRTVFEELLISSHNLMQILTDEVLKQKIAELNAHELKASGIYAAIDDAYTSPSNKKALRQVLSVIDDITNAAGQAPNWLYIETADGDGVPGKRTNSRQRKIQEIYANAAQELITGSVRGELEDKIASRADFTDRLVLYFMQGGRDIYTGEPLNIDNLSSYDIDHILPQSLIKDNSLDNRVLVHPLVNREKDTIFASTRFAKQMNGMWRQWHAAGLISSRKLRNLQMRPDEIDKYASGFVARQLVETRQIIKLTEQIVADQYPDAKIIAVKAGLSSQLRKELDFPKNREVNHYHHAFDAFLAARIGTYLLKRYPNLEPFFTYGKFKKTEVKKLKSLKSFNFIRDMTHAKDKIVAKETGEIVWDNASDINELDRIYNFKRMLITHEVRFETASLFKQTLYAAKNSKNRGGSRQLIPKKKGYLVDIYGGYTQETGSYLSVVRLTKKAMYAVVKVSTRDAAKLAVAKSISEQKENETLKKIIDGKLSKTSKKGKTTHQLFEIVLPRVGQKTLFKNSKYNQFLVNSDTYMHNYQELWMPREYQRMWKDILLSNHGDAQLEGQLDQIFKFIVSQVNSYFNLYDINQFRKKIADATDKFAKLPTHDTDNARGKIATIGQLLIGLQANAMRSDLRNLDIKTPFGLLQIGTGITLDLDTSIIYQSPTGLFEREVPLTDL

SEQ ID NO: 474 - protein, 1360 aa, Lactobacillus casei
MTKLGKPYGIGVDIGSNSIGFAAVDENSHLIRLKGKTVIGARLFEEGKAAADRRASRTTRRRLSRNRWRLSFLRDFFESHITPTDPNFFMRQKYSEISPKDKARYKYEKRLFNDRTDAEFYQQYPTMYHLRTRLLTDPSKADVREIYFAIHHILKSRGHFLTPGYAKDFNTNKVALNEIFPALQDAYAQVYPDLDITFDENKVNEFKTVLLNEKATPSDTQRALVNLLLAEDGDKDILKQQKQVLTEFAKAVVGLKTKLNVALGTEVDSSEATVWNFSLGQLDDKWAGIESAMTDEGTEILDQIRDLYRARLLNGIVPAGKTLSQAKVDDYAQHHEDLELFKDYLKQLEDDGTAKAIRQLYDRYIDGDDAKPFVREDFVKALTKEVTAHPNAKSPELLERLAQPDFMLKQRNKANGAIPVQMQQRELDQIIKNQSVYYDWLAAPNPVEKHRKSMPYQLDELLNFRIPYYVGPLVTAKEQKAAQGGVFAWMVRKDPDGNITPYNFDEKVDREASANTFIQRMKTTDTYLIGEDVLPKQSLLYQSYEVLNELNNVRVNDNKLSFDQKQQVLGELFERHNTVTIKQFVDNLLAHGDYDRIPEVRGLADEKRFLSSLSTYNQLKGILHEAIDDADKQTDIENIIAWSTIFEDKAIFKTKLNEISWLNAGMINSLANIRYRGWGQFSHKLLNELTLSTGRTVFEELLISSRNLMQILTDEVLKQKIAELNAHELKASGIYAAIDDAYTSPSNKKALRQVLSVIDDITNAAGQAPNWLYIETADGDGVPGKRTNSRQRKIQEIYANAAQELITGSVRGELEDKIASRADFTDRLVLYFMQGGRDIYTGEPLNIDNLSSYDIDHILPQSLIKDNSLDNRVLVHPLVNREKDTIFASTRFAKQMNGMWRQWHAAGLISSRKLRNLQMRPDEIDKYASGFVARQLVETRQIIKLTEQIVADQYPDTKIIAVKAGLSSQLRKELDFPKNREVNHYHHAFDAFLAARIGTYLLKRYPNLEPFFTYGKFKKTEVKKLKSFNFIRDMTHAKDKIVAKETGEIVWDNASDINELDRIYNFKRMLITHEVRFETASLFKQTLYAAKNSKNRGGSRQLIPKKKGYLVDIYGGYTQETGSYLSVVRLTKKAMYAVVKVSTRDAAKLAVAKSISEQKENETLKKIIDGKLSKTSKKGKTTHQLFEIVLPRVGQKTLFKNSKYNQFLVNSDTYMHNYQELWMPREYQRMWKDILLSNHGDAQLEGQLDQIFKFIVSQVNSYFNLYDINQFRKKIADATDKFAKLPTHDTDNARGKIATIGQLLIGLQANAMRSDLRNLDIKTPFGLLQIGTGITLDLDTSIIYQSPTGLFEREVPLTDL

SEQ ID NO: 475 - protein, 700 aa, Lactobacillus casei
MTKLGKPYGIGVDIGSNSIGFAAVDENSHLIRLKGKTVIGARLFEEGKAAADRRASRTTRRRLSRNRWRLSFLRDFFESHITPTDPNFFMRQKYSEISPKDKARYKYEKRLFNDRTDAEFYQQYPTMYHLRTRLLTDPSKADVREIYFAIHHILKSRGHFLTSGYAKDFNTNKVALNEIFPALQDAYAQVYPDLDITFDENKVNEFKTVLLDEKATPSDTQRALVNLLLAEDGDKDILKQQKQVLTEFAKAVVGLKTKLNVALGTEVDSSEATAWNFSLGQLDDKWAGIESAMTDEGTEILDQIRDLYRARLLNGIVPAGKTLSQAKVDDYEQHHEDLELFKDYLKQLEDDGMAKAIRQLYDRYIDGDDAKPFVREDFVKALTKEVTAHPNAKSPELLERLVQPDFMLKQRNKANGAIPVQMQQRELDQIIKNQSVYYDWLAAPNPVEKHRQSMPYQLDELLNFRIPYYVGPLVTAKEQKAAQGGVFAWMVRKDPDGNITPYNFDEKVDREASANTFIQRMKTTDTYLIGEDVLPKQSLLYQSYEVLNELNNVRVNDNKLSFDQKQQVLGELFERHNTVTIKQFVDNLLAHGDYDRIPEVRGLADEKRFLSSLSTYNQLKGILHEAIDDSDKQTDIEKIIAWSTIFEDKAIFKTKLNEISWLNAGMINSLANIRYRGWGQFSHKLLNELTLSTGRTVFEA

SEQ ID NO: 476 - protein, 330 aa, Lactobacillus casei
MTKLGKPYGIGVDIGSNSIGFAAVDENSHLIRLKGKTVIGARLFEEGKAAADRRASRTTRRRLSRNRWRLSFLRDFFESHITPTDPNFFMRQKYSEISPKDKNRYKYEKRLFNDRTDAEFYQQYPTMYHLRNRLLTDPSKADVREIYFAIHHILKSRGHFLTPGDAKDFNTNKVALNEIFPALQDAYAQVYPDLDITFDENKMNEFKTVLLNEKATPSDTQRALVNLLLAEDGDKDILKQQKQVLTEFAKAVVGLKTKLNVALGTEVDSSEATAWNFSLGQLDDKWAGIESAMTDEGTEILDQIRDLYRARLLNGIVPAGKTLSQAKVDD

SEQ ID NO: 477 - protein, 330 aa, Lactobacillus casei
MTKLGKPYGIGVDIGSNSIGFAAVDENSHLIRLKGKTVIGARLFEEGKAAADRRASRTTRRRLSRNRWRLSFLRDFFESHITPTDPNFFMRQKYSEISPKDKNRYKYEKRLFNDRTDAEFYQQYPTMYHLRNRLLTDPSKADVREIYFAIHHILKSRGHFLTPGDAKDFNTNKVALNEIFPALQDAYAQVYPDLDITFDENKMNEFKTVLLNEKATPSDTQRALVNLLLAEDGDKDILKQQKQVLTEFAKAVVGLKTKLNVALGTEVDSSEATAWNFSLGQLDDKWAGIESAMTDEGTEILDQIRDLYRARLLNGIVPAGKTLSHAKVDD

SEQ ID NO: 478 - protein, 1361 aa, Lactobacillus casei
MTKLGKPYGIGVDIGSNSIGFAAVDENSHLIRLKGKTVIGARLFEEGKAAADRRASRTTRRRLSRNRWRLSFLRDFFESHITPTGPNFFMRQKYSEISPKDKARYKYEKRLFNDRTDAEFYQQYPTMYHLRNRLLTDPSKADVREIYFAIHHILKSRGHFLTSGYAKDFNTNKVALNEIFPALQDAYAQVYPDLDITFDENKVNEFKTVLLNEKATPSDTQRALVNLLLAEDGDKDILKQQKQVLTEFAKAVVGLKTKLNVALGTEVDSSEATVWNFSLGQLDDKWAGIESAMTDEGTEILDQIRDLYRARLLNGIVPAGNTLSQAKVDDYAQHHEDLELFKDYLKQLEDDGTAKAIRQLYDRYIDGDDAKPFVREDFVKALTKEVTAHPNAKSPELLERLAQPDFMLKQRNKANGAIPVQMQQRELDQIIKNQSVYYDWLAAPNPVEKHRKSMPYQLDELLNFRIPYYVGPLVTAKEQKAAQGGVFAWMVRKDPDGNITPYNFDEKVDREASANTFIQRMKTTDTYLIGEDVLPKQSLLYQRYEVLNELNNVRVNNEKLSIEQKQQVIRELFERHNSVTIKQFAENLRAHGDYAHIPEIRGLADEKRFLSSLSTYRQLKSLLPDAIDDPAKQADIENIIAWSTVFEDAAIFKTKLKEINWLDSQTITKLSNIRYRGWGQFSHKFLNGLTLGNGHTIIQELFLSNNNLMQILTDETLQKKMTELNADKLKAANINDAIDDAYTSPSNKKALRQVLRVIEDIKRAADGQDPSWLYVETADGGGTPGKRTRARQHQLQEIYANAAHELIDSAVRGELEDKIADKADFNDRLVLYFMQGGRDIYTGTPLNIDQLSSYDIDHILPQSLIKDNSLDNRVLVHAIINREKNATFASTIYAQKMNATWRQWHEAGLISGRKLRNLQMRPDQIDKYASGFVARQLVETRQIIKLTEQIVAAQYPETKIIAVKAGLSHQLREELEFPKNRDVNHYHHAFDAFLAARIGTYLLKRFPNLQAFFTYGKFKKADVKKLRGFNFIRDITHAEDKIVVKDTGEVIWDKKRDVDELDRIYNFKRMLITHEVHFEKADLFKQTVYGAKDSKEAGGKKQLISKKKGYPVDIYGGYTQETGSYLSVVRLTKKAMYAVVKVSTRDAAKLAVAKSISEQKENETLNDIIDEKLSKISKNGKITHELFEVVLPRVGQKTLFKNSKYNLFLVNSDTYMHNYQELWMPREYQKMWKDISLSKYGDAQTEDQLDQIFGFIVSQVNSYFNLYDINQFRKKLNDAADKFATLPMRDTDDMQGKIATIGQLLIGLQANAARSDLRNLDIKTPLGLLQIPNGISLDSDTSVVYQSPTGLLEREVHLSDL

SEQ ID NO: 479 - protein, 1128 aa, Lactobacillus casei
MTKLGKPYGIGVDIGSNSIGFAAVDENSHLIRLKGKTVIGARLFEEGKAAAKRRAGRTTRRRLSRNRWRLSFLRDFFESHITPTDPNFFMRQKYSEISPKDKARYKYEKRLFNDRTDAEFYQQYSTMYHLRNRLMTDPSRADVREIYFAIHHILKSRGHFLTPGDAKDFNTNDVALDEIFPALQDAYAQVYPDLGITFDEDKANEFKTILLNEIATSIDTQRALVKLLLAEEDDKDILKQQKQVLTEFAKAVVGLKTKLNLALGTEVDSSEATAWNFSLGQLDDKWAGIESAMTDEGTEILDQIRDLYRARLLNGIVPTGKTLSQAKVDDYTQHHEDLQLFKAYLKQLEDDGTAKAIRQLYDRYIDGDDAAPFLRENFVKALTKDVTAHPNTKSPELLERLAQPDFMLKQRNKANGAIPVQMQQRELDQIIKNQAVYYDWLAAPNPVEKHRKSMPYQLDELLNFRIPYYVGPLVTAKEQKAAQGGVFAWMVRKDPEGNITPYNFDEKVDREASANTFIQRMKTTDTYLIGEDVLPKQSLLYQRYEVLNELNNVRVNNEKLSIEQKQQVIRELFERHNSVTIKQFAENLRAHGDYAHIPEIRGLADEKRFLSSLSTYRQLKSLLPEAIDDPAKQADIENIIAWSTVFEDAAIFKTKLKEISWLGSEAITKLSNIRYRGWGQFSRKFLNGLTLGNGHTIIQELLLSTNNLMQILTDETLQKKMTELNADKLKTANINDAIDNAYTSPSNKKALRQVLRVVDDIKRAADGQDPSWLYVETADGGGTPGKRTRARQHQLQEIYANAAHELIDTAVRGELEDKISDKADFNDRLVLYFMQGGRDIYTGAPLNIDQLSSYDIDHILPQSLIKDNSLDNRVLVHAIINREKNATFASTIYAQKMNATWRQWHEAGLISGRKLRNLQMRPDQIDKYASGFVARQLVETRQIIKLTEQIVAAQYPDTKIIAVKAGLSHQLREELEFPKNRDVNHYHHAFDAFLAARIGTYLLKRFPNLQAFFTYGKFTKADVKKLRGFNFIRDITHAEDKIVAKDTGEVVWDKQRDVDELDRIYNFKRMLITHEVRFETADLFKQTVYGARDSKEAGGSKQLIPKKKDIQLIFMGAISERTRPILPL

SEQ ID NO: 480 - protein, 1366 aa, Lactobacillus casei
MTKLGKPYGIGVDIGSNSIGFAAVDENSHLIRLKGKTVIGARLFEEGKAAAYRRASRTTRRRLSRNRWRLSFLRDFFESHITPTDPNFFMRQKYSEISPKDKARYKYEKRLFNDRTDAEFYQQYPTMYHLRTRLLTDPSKADVREIYFAIHHILKSRGHFLTPGYAKDFNTNKVALNEIFPALQDAYAQVYPDLDITFDENKVNEFKTVLLNEKATPSDTQRALVNLLLAKEGDRDILKQQKQVLTEFAKAVVGLKTKLNVALGTEVDSSEATAWNFSLGQLDDKWAGIESAMTDEGTEILDQIRDLYRARLLNGIVPAGKTLSQAKVDDYAQHHEDLELFKDYLKQLEDDGTAKAIRQLYDRYIDGDDAKPFVREDFVKALTKEVTAHPNAKSPELLERLAQPDFMLKQRNKANGAIPVQMQQRELDQIIKNQAVYYDWLAAPNPVEKHRQSMTYQLDELLNFRIPYYVGPLVTAKEQKAAQGGVFAWMVRKDPDGNITPYNFDEKVDREASANTFIQRMKTTDTYLIGEDVLPKQSLLYQSYEVLNELNNVRVNDNKLSFDQKQQVLGELFERHNTVTIKQFVDNLLAHGDYDRIPEVRGLADEKRFLSSLSTYNQLKGILHEAIDDADKQTDIENIIAWSTIFEDKAIFKTKLNEISWLNAGMINSLANIRYRGWGQFSHKLLNELTLSTGRTVFEELLISSRNLMQILTDEVLKQKIAELNAHELKASGIYAAIDDAYTSPSNKKALRQVLSVIDDITNAAGQAPNWLYIETADGDGVPGKRTNSRQRKIQEIYANAAQELITGSVRGEFEDKIASRADFTDRLVLYFMQGGRDIYTGEPLNIDNLSSYDIDHILPQSLIKDNSLDNRVLVHPLVNREKDTIFASTRFAKQMNGMWRQWHAAGLISSRKLRNLQMRPDEIDKYASGFVARQLVETRQIIKLTEQIVADQYPDTKIIAVKAGLSSQLRKELDFPKNREVNHYHHAFDAFLAARIGTYLLKRYPNLEPFFTYGKFKKTEVKKLKSLKSLKSFNFIRDMTHAKDKIVAKETGEIVWDNASDINELDRIYNFKRMLITHEVRFETASLFKQTLYAAKNSKNRGGSRQLIPKKKGYLVDIYGGYTQETGSYLSVVRLTKKAMYAVVKVSTRDAAKLAVAKSISEQKENETLKKIIDGKLSKTSKKGKTTHQLFEIVLPRVGQKTLFKNSKYNQFLVNSDTYMHNYQELWMPREYQRMWKDILLSNHGDAQIEGQLDQIFKFIVSQVNSYFNLYDINQFRKKIADATDKFAKLPTHDTDNARGKIATIGQLLIGLQANAMRSDLRNLDIKTPFGLLQIGTGITLDLDTSIIYQSPTGLFEREVPLTDL

SEQ ID NO: 481 - protein, 1354 aa, Lactobacillus coryniformis
MTLHYNVGLDIGTNSVGYTIVDDNGKILQVKGKNGYGVRVFKEGATAAERRIFRTTHRRLKRRKWRLRLLQDFFEPYILPQDDGFFIRRKESNLVLNDRDEDTASLFNDRSDRDFYQAYPTIYHLRQALMTEKRQFDVREIYLAMHHIIKYRGHFLLNGTVNNFTNNKIDLHSDFEELNALLLNVIPELKFQIDLDHSTMFQTTLLNTTISRSGRQRDLVKSFYNGSDDKQLAKQQKSVATELLKAILGLKAKFHKLFNLDLLETTEWEFSFDAEDIDDKLAKLEPLMTENQQQVMDILQRIFAAITLNGIVPEGKTLSASKVDSYQKHKQDLKLLKAIAQHSDKKTATVLQTAYNEYINGIASKPLKQEDFYKRLTNAVKKSSDPQVADMLALIDQEKFLPKQRTKENGAIPHQLHQLELERIIDNQKDYYPWLAELNPNQARQKVAKYKLSELVAFRVPYYVGPLIEPEVQQATSNAHFAWMARKEAGPITPWNFDQKVDRNVSAERFIKRMTTKDTYLLAEDVLPLHSLLYQRFIVLNELNNVRVNGQKLTKKQKQAVYQDLFKRQPHVTKKQFKSYLVQTGEFAESSKIEGLANETSFNSGLTTENELRKIFGAQLDEARYQVDFEQIIEWATLFEDAKILRTKLAEITWLTTEQIEKLAGIRYRGWGRFSRKLLAGLRDQNGQQIIDLLWDTPNNFMVIVSQAAFSEAITKENEKLIDRRGAQDVITDLYTSPQNKKALRQVLAIVADVQKAMGGVPPQRIFIEFAREDEKNPRRSVERSRQLEKLYQTISNEFLINSEVRQELKEAVDQKVNFKDRLFLYFLQGGVDLYSGKRINIDQLSHYDIDHILPQSFIKDDSLDNRVLVSQKLNRSKSDSVPLSEFANYKFGPAMQAKWLQLKEAGLLSKRKYDNLTLDPTKLSKFAPLGFVNRQLVETRQVIKLAANLLASEETKVVTIKANMTHQVRKELDFPKNRNVNNYHHAFDAYLTAFVGIFLSKRYPKLKPYFTYGDFQKGNKLPDLKNFNFLYELKNKDRSIDSNTGEIIWDKQRDLAYMNKIYNFKKVTVVHEVLTKSGALYNQTLYKASEDKASGRGTKQLIRKKDNMPTELYGGYTGSTSAFMSIVRLWKKDKPYYKVVGIPTRMAAKLANQAQLLDYLTKKFTTRKLVKKTGDYKTTVERFELVVPKVGFNQLVIDGGQPFMLGSATYQYNARELFISKEAVKALNKQLSTHVDLVQVFDEILVQVNRWFPLYDTNGFREKLSHGRDRFMKLNDSFEEKSDTQIDVLNRILIGFHANAARTNLKILGLGTDLGFMTQQAGIRLTEKAILVHQSPSGLFERKVALRDLKGLR

SEQ ID NO: 482 - protein, 544 aa, Lactobacillus crispatus
KYYLYFMQLGRDAYTGKPINIDEVSQYYDIDHILPQSFIKDDSLNNRVLVAKPINNGKSDGVPLKLFGDNLATGLGITVKQMWNNWADKGLINKAKQNNLFLDPENINKHQASGFIRKQLVETSQIIKLATTILQAEYPKTKIIVVKASSNHYLRNEFDLYKSREVNDYHHAIDAYLTTICGNLLYQAYPKLRPFFVYGQFKKFSSDPKKENEILKKTKNFDFVAKLLGSKAPNEIRSQQGKVLFEKNKIRLQLNKAYNYKYMLVSRDTTTKNQEMFGMTIYPRAERDIAKSRKLIEKRKGFSTDIYGGYTGTAAAYMAIVRINKTKSSQYKVIAVPMTKRAILNKAEKEGNYEKILKQILSPSILYNDKGKRKAGVISFDIIKGKVPYNQVVQDGNKKFLLKSAIYLCNAKQLVLSEEAMRVITGHWLDSDKQDQELLDVYDEILEKIDRYLPLFDIRDFRNKLHKGREKFLKLNAEDKFKAIIQILKGLHDNSDTGELKDIGITVPFGQLQNNSGITLSSDTILVYQSPTGLFEKRVKISSL

SEQ ID NO: 483 - protein, 298 aa, Lactobacillus crispatus
MDELNKISVNGKKLSVSVKQELYEDLFKKNNTVSAKQLKNWLIENQKLPYIKIKGLADQTKFNSSLSTYIKLKKSGLFVDKLDSNEFRDDFEKIIEWSTIFEDKQIYIQKLQTIDWLTAKQIQFLQNIRLQGWGRLSKKLLTAIVDSNGQNIIEQLWNSQQIFMSIVNKADIKGTITDANQDLMHSNSMEDILSEAYTSPANKKMIRQVVKVVHDIQKAASGQAPKQIAIEFARESRRNSKLSQTRGHKLQDIYQKISGDIVNKNLKDKLAEYIKNNQLSVWEKTSFQMNKNDQDFLF

SEQ ID NO: 484 - protein, 279 aa, Lactobacillus crispatus
MNGKKLSVSVKQELYEDLFKKNNTVSAKQLKNWLIENQKLPYIKIKGLADQTKFNSSLSTYIKLKKSGLFVDKLDSNEFRDDFEKIIEWSTIFEDKQIYIQKLQTIDWLTAKQIQFLQNIRLQGWGRLSKKLLTAIVDSNGQNIIEQLWNSQQIFMSIVNKADIKGTITDANQDLMHSNSMEDILSEAYTSPANKKMIRQVVKVVHDIQKAASGQAPKQIAIEFARESRRNSKLSQTRGHKLQDIYQKISGDIVNKNLKDKLAEYIKNNQLNKDKYYTR

SEQ ID NO: 485 - protein, 538 aa, Lactobacillus crispatus
MQLGRDAYTGKPINIDEVSQYYDIDHILPQSFIKDDSLNNRVLVAKPINNGKSDGVPLKLFGDNLATGLGITVKQMWNNWADKGLINKAKQNNLFLDPENINKHQASGFIRKQLVETSQIIKLATTILQAEYPKTKIIVVKASSNHYLRNEFDLYKSREVNDYHHAIDAYLTTICGNLLYQAYPKLRPFFVYGQFKKFSSDPKKENEILKKTKNFDFVAKLLGSKAPNEIRSQQGKVLFEKNKIRLQLNKAYNYKYMLVSRDTTTKNQEMFGMTIYPRAERDIAKSRKLIEKRKGFSTDIYGGYTGTAAAYMAIVRINKTKSSQYKVIAVPMTKRAILNKAEKEGNYEKILKQILSPSILYNDKGKRKAGVISFDIIKGKVPYNQVVQDGNKKFLLKSAIYLCNAKQLVLSEEAMRVITGHWLDSDKQDQELLDVYDEILEKIDRYLPLFDIRDFRNKLHKGREKFLKLNAEDKFKAIIQILKGLHDNSDTGELKDIGITVPFGQLQNNSGITLSSDTILVYQSPTGLFEKRVKISSL

SEQ ID NO: 486 - protein, 206 aa, Lactobacillus crispatus
MQLGRDAYTGKPINIDEVSQYYDIDHILPQSFIKDDSLNNRVLVAKPINNGKSDGVPLKLFGDNLATGLGITVKQMWNNWADKGLINKAKQNNLFLDPENINKHQASGFIRKQLVETSQIIKLATTILQAEYPKTKIIVVKASSNHYLRNEFDLYKSREVNDYHHAIDAYLTTICGNLLYQAYPKLRPFFVYGQFKKFSSDPKKRK

SEQ ID NO: 487 - protein, 857 aa, Lactobacillus crispatus
MTKLNNEYMVGLDIGTNSCGWVATDFDNNILKMHGKRALGSHLFDEGVSAADRRAFRTTRRRIKRRKWRLKLLEEIFDEEMAKVDPNFFARLKESGLSPLDTRKNVSSIVFPTKKMDKQFYKKFPTIYHLRNALMKQDKKFDLRAIYIAIHHIVKYRGNFLSNSSISNFSASKIEIDRFVNELNDLYSIFLPESGVIFDAGNASKVEDIIRNEQMFKLDKIKEIADVLPDTENKSGLKLSKKISKEISKAILGYKAKFEIILQVNVDKTDSSIWNFKLNDENADVNLSEITSDLTDTQLQILDLVRNLFSAISLLNIVDEGSTLSESMIRKYNDHAQDLKLLKTVIKNHSDRKKAHNLQLAYDKYVNNRHFVDVETKKAFPNKHLYRKSDFYEIVKKNLDASKEAVQIRKEIALDKFMPKQRSDENGVIPFQLNQIELDKIIENQGKYYPFLKEINPIKAHRMQAPYKLDELIRFRVPYYVGPMIEPTNSSYPQTRQNQSFAWMVRKAKGRITPWNFDEKVDRQKSANNFIKRLTTKDTYLFGEDVLPANSLLYQKYTVLDELNKISVNGKKLSVSVKQELYEDLFKKNNTVSAKQLKNWLIENQKLPYIKIKGLADQTKFNSSLSTYIKLKKSGLFVDKLDSNEFRDDFEKIIEWSTIFEDKQIYIQKLQTIDWLTAKQIQFLQNIRLQGWGRLSKKLLTAIVDSNGQNIIEQLWNSQQIFMSIVNKADIKGTITDANQDLMHSNSMEDILSEAYTSPANKKMIRQVVKVVHDIQKAASGQAPKQIAIEFARESRRNSKLSQTRGHKLQDIYQKISGDIVNKNLKDKLAEYIKNNQLSVWEKTSFQMNKNDQDFLF

SEQ ID NO: 488 - protein, 857 aa, Lactobacillus crispatus
MTKLNNEYMVGLDIGTNSCGWVATDFDNNILKMHGKRALGSHLFDEGVSAADRRAFRTTRRRIKRRKWRLKLLEEIFDEEMAKVDPNFFARLKESGLSPLDTRKNVSSIVFPTKKMDKQFYKKFPTIYHLRNALMKQDKKFDLRAIYIAIHHIVKYRGNFLSNSSISNFSASKIEIDRFVNELNDLYSIFLPESGVIFDAGNASKVEDIIRNEQMFKLDKIKEIADVLPDTENKSGLKLSKKISKEISKAILGYKAKFEIILQVNVDKTDSSIWNFKLNDENADVNLSEITSDLTDTQLQILDLVRNLFSAISLLNIVDEGSTLSESMIRKYNDHAQDLKLLKTVIKNHSDRKKAHNLQLAYDKYVNNRHFVDVETKKAFPNKHLYRKSDFYEIVKKNLDASKEAVQIRKEIALDKFMPKQRSDENGVIPFQLNQIELDKIIENQGKYYPFLKEINPIKAHRMQAPYKLDELIRFRVPYYVGPMIEPTNSSYPQTRQNQSFAWMVRKAKGRITPWNFDEKVDRQKSANNFIKRLTTKDTYLFGEDVLPANSLLYQKYTVLDELNKISVNGKKLSVSVKQELYEDLFKKNNTVSAKQLKNWLIENQKLPYIKIKGLADQTKFNSSLSTYIKLKKSGLFVDKLDSNEFRDDFEKIIEWSTIFEDKQIYIQKLQTIDWLTAKQIQFLQNIRLQGWGRLSKKLLTAIVDSNGQNIIEQLWNSQQIFMSIVNKADIKGTITDANQDLMHSNSMEDILSEAYTSPANKKMIRQVVKVVHDIQKAASGQAPKQIAIEFARESRRNSKLSQTRGHKLQDIYQKISGDIVNKNLKDKLAEYIKNNQLSVWEKNSFQMNKNDQDFLF

SEQ ID NO: 489 - protein, 347 aa, Lactobacillus crispatus
MVNLKSLVLILKKENEILKKTKNFDFVAKLLGSKAPNEIRSQQGKVLFEKNKIRLQLNKAYNYKYMLVSRDTTTKNQEMFGMTIYPRAERDIAKSRKLIEKRKGFSTDIYGGYTGTAAAYMAIVRINKTKSSQYKVIAVPMTKRAILNKAEKEGNYEKILKQILSPSILYNDKGKRKAGVISFDIIKGKVPYNQVVQDGNKKFLLKSAIYLCNAKQLVLSEEAMRVITGHWLDSDKQDQELLDVYDEILEKIDRYLPLFDIRDFRNKLHKGREKFLKLNAEDKFKAIIQILKGLHDNSDTGELKDIGITVPFGQLQNNSGITLSSDTILVYQSPTGLFEKRVKISSL

SEQ ID NO: 490 - protein, 534 aa, Lactobacillus crispatus
RDAYTDKPINIDEVSQYYDIDHILPQSFIKDDSLNNRVLVAKPINNGKSDGVPLKLFGDNLATGLGITVKQMWNNWADKGLINKAKQNNLFLDPENINKHQASGFIRKQLVETSQIIKLATTILQAEYPKTKIIVVKASSNHYLRNEFDLYKSREVNDYHHAIDAYLTTICGNLLYQAYPKLRPFFVYGQFKKFSSDPKKENEILKKTKNFDFVAKLLGSKAPNEIRSQQGKVLFEKNKIRLQLNKAYNYKYMLVSRDTTTKNQEMFGMTIYPRAERDIAKSRKLIEKRKGFSTDIYGGYTGTAAAYMAIVRINKTKSSQYKVIAVPMTKRAILNKAEKEGNYEKILKQILSPSILYNDKGKRKAGVISFDIIKGKVPYNQVVQDGNKKFLLKSAIYLCNAKQLVLSEEAMRVITGHWLDSDKQDQELLDVYDEILEKIDRYLPLFDIRDFRNKLHKGREKFLKLNAEDKFKAIIQILKGLHDNSDTGELKDIGITVPFGQLQNNSGITLSSDTILVYQSPTGLFEKRVKISSL

SEQ ID NO: 491 - protein, 278 aa, Lactobacillus crispatus
SVNGKKLSVSVKQELYEDLFKKNNTVSAKQLKNWLIENQKLPYIKIKGLADQTKFNSSLSTYIKLKKSGLFVDKLDSNEFRDDFEKIIEWSTIFEDKQIYIQKLQTIDWLTAKQIQFLQNIRLQGWGRLSKKLLTAIVDSNGQNIIEQLWNSQQIFMSIVNKADIKGTITDANQDLMHSNSMEDILSEAYTSPANKKMIRQVVKVVHDIQKAASGQAPKQIAIEFARESRRNSKLSQTRGHKLQDIYQKISGDIVNKNLKDKLAEYIKNNQLNKDKYY

SEQ ID NO: 492 - protein, 277 aa, Lactobacillus crispatus
SVNGKKLSVSVKQELYEDLFKKNNTVSAKQLKNWLIENQKLPYIKIKGLADQTKFNSSLSTYIKLKKSGLFVDKLDSNEFRDDFEKIIEWSTIFEDKQIYIQKLQTIDWLTAKQIQFLQNIRLQGWGRLSKKLLTAIVDSNGQNIIEQLWNSQQIFMSIVNKADIKGTITDANQDLMHSNSMEDILSEAYTSPANKKMIRQVVKVVHDIQKAASGQAPKQIAIEFARESRRNSKLSQTRGHKLQDIYQKISGDIVNKNLKDKLAEYIKNNQLNKDKY

SEQ ID NO: 493 - protein, 1368 aa, Lactobacillus curvatus
MSRPYNIGLDIGTSSIGWSVVDDQSKLVSVRGKYGYGVRLYDEGQTAAERRSFRTTRRRLKRRKWRLGLLREIFEPYITPIDDTFFLRQKQSNLSPKDQRKLYTQTSLFNDRTDRAFYDDYPTIYHLRYRLMTEKRQFDIREIYLAMHHIVKYRGHFLNEAPVSSFKSSEINLVAHFDRLNTIFADLFSESGFQLETDKLAEVKALLLDNQQSASNRQRQALSLIYTPSTNKAVEKQNKAIATELLKAILGLKAKFNVLTGIEAEDVKAWTLTFNAENFDEEMVKLESSLDDNAHQIIESLQELYSGVLLAGIVPENQSLSQAMITKYDDHQKHLKMLKAVREALAPGDRQRLKQAYDQYVDGQENTKAYSKEDFYGDITKALKNNPDHPIVSEIKKLIELDQFMPKQRTKDNGAIPHQLHQQELDRIIENQQQYYPWLAELNPNSKRQTVAKYKLDELVAFRVPYYVGPLITAEQQRQSSDAKFAWLIRKAEGRITPWNFDDKVDRQASANEFIKRMTTTDTYLLAEDVLPKQSLIYQRFEVLNELNGLKIDDQPITTELKQAIFTDLFMQKISVTVKNIQDYLVSEKRYASRPAITGLSDENKFNSRLSTYHDLKMIVGDAVDDVDKQADLEKCIEWSTIFEDGKIYSAKLNEIDWLTDQQRVQLAAKRYRGWGRLSAKLLTQIVNANGQRIMDLLWDTTDNFMRIVHSEDFDKLITEANQMMLAENDVQDVINDLYTSPQNKKALRQILLVVNDIQKAMKGQAPERILIEFAREDEVNSRLSVQRKRQVEQVYQNISNELLNNTEIRNELKDLSNSALSNTRLFLYFMQGGRDMYTGDSLNIDRLSTYDIDHILPQSFIKDNSLDNRVLVSQKMNRSKADQVPTDFTSVELGQKMQIQWEQMLRAGLITKKKYDNLTLNPDHISKYAMKGFINRQLVETRQVIKLATNLLMEQYGEDNIELITVKSGLTHQMRTEFDFPKNRNLNNHHHAFDAYLTAFVGLYLLKRYPKLKPYFVYGEYQKASQQDKWRNFNFLNGLKKDELVDENTEAVIWDKESGLAYLNKIYQFKKILVTRGVHENSGALFNQTLYAAKDDKASGQGGKQLIPAKQDRSTALYGGYSGKTVAYMCIVRIKNKKGDLYKVCGVETSWLAQLKQLTDEDSQKAFLEQKISPQFTKVKKQKGNIIEAVEEFEVIAPHILINQRFFDNGQELTLGSATYKHNEQELILDKTAVKLLNGALPLTQSEELAEQVYDEILDQVMHYFPLYDTNQFRAKLSTGKAAFMKLPWKSQWDGNKMVQVGQQVILDRILIGLHANAAMSDLKVLKMTTPFGMIQQSTGITLSADTQIIYQSPTGLFERRVALRDL

SEQ ID NO: 494 - protein, 669 aa, Lactobacillus delbrueckii
MAKPKDYTIGLDIGTNSVGWVVTDDQNNILRIKGKKAIGARLFTEGKVAAERRSFRTTRRRLSRRRWRIKMLEELFDEEIAKVDPSFFARLHESWISPKDKRKRYSAIVFPSPEEDKKFHESYPTIYHLRDKLMKDDQKHDIREIYIAVHQMIKARGNFLHDESVETYRSGMSSLGGRSERNILSVQTLEELNDLFAENEGTEEVELNVASAEQINDILTGGHLNADSQKEISNLLLPSSFPSFDDKAKEKQVKKLINNVATNISKAWLGYKADFSTILNLAKVDKDQKKIFAFALQGGDEEDKVQELESLLEQSQTDIVDRLIEIRHAIVLSEIVPVGMTLSEAMIDKYDQHKEDLITLKAVIRNTKDKKKAAKLQAIYDLYVKKRHADLAKAMKLTGIKKRSELLDPEELKKGISSLLDDSPEAVEIKQRLEEKTFLPLQRSNNNGVIPNQLHQVELDEIIKKQSKYYPFLAEKNPDESEEAQKKAPTKLDALLTFRVPYYVGPMITKEEQEAQNGHSFAWMVRRDPQDHEAITPWNFEKKVDKMASATQFIKRMTTKDTYLLGEDVLPASSLKYQLFTVLNELNNLRVNGKKLTSDEKEQVIEGLFKKQKTVKADKFVKYWQAKHIGADIKVKGLSDPSKFNSTMSTYIDFKKIFGDQLNDVNRQR

SEQ ID NO: 495 - protein, 544 aa, Lactobacillus delbrueckii
MTGCADYDVDHIMPQSFVKDDSLDNRVLVARAVNNQKSDKVPALLFGNKVVADLGITVREMWDKWQKLGMISKRKLSNLLTDPDALTEYRAQGFIRRQLVETSQVIKLTATILQSEFPDSKIIEVPAKYNSIVRKQFDLYKSREVNDFHHAIDAYLSTIVGNYLYQVYPNLRRMFVYGEFKKFSSNAEESAHDVARRVKSMNFLDDLLRGTHGDNIYCRSTGEIVFNRNDIISKLKQAYSFKQMLVTQEVFTKKSALFDQTVYPSPERDSKKRSGLIPRKKGMDTEIYGGYSGNKDAYFVLAEAVKEKGHTLQIVGVPIRALNTLKNSANYSEKLLEIIKPQVMFNKDTGKPIKGIKDVKILMDKIPCRQPVLEGESYYMLASSKYRYSLKQISLSQMSMKYILDYIDDPNFNKHEMINIDQQDEKECLLSVYDEILEKMDKYLPLFDIRSFRKKLHDGRDAFIALPVASEEKKPGEVDVIRKILKGLHANADITNLAELGFGTAALGALVSTGGIKISDDAVFIYQSPTGLFERRVKVSDLLK

SEQ ID NO: 496 - protein, 1356 aa, Lactobacillus farciminis
MTKKEQPYNIGLDIGTSSVGWAVTNDNYDLLNIKKKNLWGVRLFEEAQTAKETRLNRSTRRRYRRRKNRINWLNEIFSEELAKTDPSFLIRLQNSWVSKKDPDRKRDKYNLFIDGPYTDKEYYREFPTIFHLRKELILNKDKADIRLIYLALHNILKYRGNFTYEHQKFNISNLNNNLSKELIELNQQLIKYDISFPDDCDWNHISDILIGRGNATQKSSNILKDFTLDKETKKLLKEVINLILGNVAHLNTIFKTSLTKDEEKLNFSGKDIESKLDDLDSILDDDQFTVLDAANRIYSTITLNEILNGESYFSMAKVNQYENHAIDLCKLRDMWHTTKNEEAVEQSRQAYDDYINKPKYGTKELYTSLKKFLKVALPTNLAKEAEEKISKGTYLVKPRNSENGVVPYQLNKIEMEKIIDNQSQYYPFLKENKEKLLSILSFRIPYYVGPLQSAEKNPFAWMERKSNGHARPWNFDEIVDREKSSNKFIRRMTVTDSYLVGEPVLPKNSLIYQRYEVLNELNNIRITENLKTNPIGSRLTVETKQRIYNELFKKYKKVTVKKLTKWLIAQGYYKNPILIGLSQKDEFNSTLTTYLDMKKIFGSSFMEDNKNYDQIEELIEWLTIFEDKQILNEKLHSSKYSYTPDQIKKISNMRYKGWGRLSKKILMDITTETNTPQLLQLSNYSILDLMWATNNNFISIMSNDKYDFKNYIENHNLNKNEDQNISDLVNDIHVSPALKRGITQSIKIVQEIVKFMGHAPKHIFIEVTRETKKSEITTSREKRIKRLQSKLLNKANDFKPQLREYLVPNKKIQEELKKHKNDLSSERIMLYFLQNGKSLYSEESLNINKLSDYQVDHILPRTYIPDDSLENKALVLAKENQRKADDLLLNSNVIDRNLERWTYMLNNNMIGLKKFKNLTRRVITDKDKLGFIHRQLVQTSQMVKGVANILDNMYKNQGTTCIQARANLSTAFRKALSGQDDTYHFKHPELVKNRNVNDFHHAQDAYLASFLGTYRLRRFPTNEMLLMNGEYNKFYGQVKELYSKKKKLPDSRKNGFIISPLVNGTTQYDRNTGEIIWNVGFRDKILKIFNYHQCNVTRKTEIKTGQFYDQTIYSPKNPKYKKLIAQKKDMDPNIYGGFSGDNKSSITIVKIDNNKIKPVAIPIRLINDLKDKKTLQNWLEENVKHKKSIQIIKNNVPIGQIIYSKKVGLLSLNSDREVANRQQLILPPEHSALLRLLQIPDEDLDQILAFYDKNILVEILQELITKMKKFYPFYKGEREFLIANIENFNQATTSEKVNSLEELITLLHANSTSAHLIFNNIEKKAFGRKTHGLTLNNTDFIYQSVTGLYETRIHIE

SEQ ID NO: 497 - protein, 1313 aa, Lactobacillus fermentum
MHYLDEIFAPHLQEVDENFLRRLKQSNIHPEDPAKNQAFIGKLLFPDLLKKNERGYPTLIKMRDELPVEQRAHYPVTNIYKLREAMINEDRQFDLREVYLAVHHIMKYRGHFLNNASVDKFKVGRIDFYKSFNVLNEAYEELQNGEGSFTIEPSKVEKIGQLLLDTKMRKLNRQKAVAKLLEVKVADKEETKRNKQIATAMSKLVLGYKADFATVAMANGNEWKIDLSSETSEDEIEKFREELSDAQNDILTEITSLFSQIMLNEIVPNGMSISESMMDRYWTHERQLAEVKEYLATQPASARKEFDQVYNKYIGQAPKERGFDLEKGLKKILSKKENWKEIDELLKAGDFLPKQRTSANGVIPHQMHQQELDRIIEKQAKYYPWLATENPATGERDRHQAKYELDQLVSFRIPYYVGPLVTPEVQKATSGAKFAWAKRKEDGEITPWNLWDKIDRAESAEAFIKRMTVKDTYLLNEDVLPANSLLYQKYNVLNELNNVRVNGRRLSVGIKQDIYTELFKKKKTVKVSDVASLVMAKTRGVNKPSVEGLSDPKKFNSNLATYLDLKSIVGDKVDDNRYQTDLENIIEWRSVFEDGEIFADKLTEVEWLTDQQRSALVKKRYKGWGRLSKKLLTGIVDENGQRIIDLMWNTDQNFMQIVNQPVFKEQIDQLNQKAITNDGMTLREWVESVLDGAYTSPQNKKAIWQVVRVVEDIVKAVGNAPKSISIEFARNEGNKGEITRSRRTQLQKLFEDQAHELVKDTSLTEELEKAPDLSDRYYLYFTQGGKDMYTGDPINFDEISTKYDIDHILPQSFVKDDSLDNRVLVSRAENNKKSDRVPAKLYAAKMKPYWNQLLKQGLITQRKFENLTMDVDQNIKYRSLGFVKRQLVETRQVIKLTANILGSMYQEAGTDIIETRAGLTKQLREEFDLPKVREVNDYHHAVDAYLTTFAGQYLNRRYPKLRSFFVYGEYMKFKHGSDLKLRNFNFFHELMEGDKSQGKVVDQQTGELITTRDEVAKSFDRLLNMKYMLVSKEVHDRSDQLYGATIVTAKESGKLTSPIEIKKKRPVDLYGAYTNGTSAFMTIIKFTGNKPKYKVIGVPTTSAVGLKRVGKPGSESYNQELHRIIKSNPKVKKDFEIVVPHVSYSQLIVDDDCKFTLASDTYQHPATQLVLSKESMEIIADDFKFVKENTATADEQLVRVFDEIVNQMNHYFTIFDQRSNRQKVTKARDKFVSLPTESEYEGAKKTQVGKTEVITNLLMGLHANSAQGDLKVLGLSTFGFFQSSGGLNLSEDAMIVYQSPTGLFERRICLKDI

SEQ ID NO: 498 - protein, 1327 aa, Lactobacillus florum
MTEQQQPYNIGLDIGTSSIGWAVTDQNDKLLHIRGHNGIGVRLFKEGESAAERRGFRTTRRRLSRRRWRLRFLDRIFDAELAKVDPNFLARLKQSNISPLDPNKQMFGNILFDDPQFDDQKFHQQYPTIYHLRSALAQPDAPQADVRLIYLALHHMIKFRGHFLNGAAVEKFHGGQLHLESEFQELNQIFSNQQRDHVQLQTSSLDEVATILKDNQRTPSDRQRELSARLFVPVDKTIDKENKKLATELLKAVLGLKAKFDVILGVEATDPQAFKLQFSSDDFDDKIAELASELTDEANEILTVLQRLYFSLNLADILTNRQTKQVADSISTAMINRYDDHKHHLKMLKELEAQVTQEQRDGLKKAYDEYIDGDKPTIDTFYTNIKKNLDDSELANQIKSLIDLQAFMPKQRSKENGSIPHQLHQRELDQLIEVQGKYYPWLLAAKDKLDALIAFRVPYYVGPMIDPNQSDDPQNTKFAWMVRKEAGEITPWNFEEKVDKTSSATNFIKRMTTTDTYLLGEPVLPKNSLLYQQFTVLNELNKLKVNGKALTVDQKKYLYEHVCKKQRRVTLKKLSDCLMARGDFPMGAIFTGTTDQKNMNNTLKTYQDFQEIFGDEIDNPDRQVDFEKMIEWSAIFEDREIFKLKLAELNWLTSEQLERVSKKRYQGWGRLSQKLLTHIVNENGERIIDQLWNTNQNFMEIMGQDSVKQAIQEHNGANVAQTGINETIDELYTSPQNKKAIRQILLVVDDIKKAVGYAPANIMMEFAREDRDDHRLIASRARQLEKTYQEISKNWFDNESVTQELKDQIKNKTKFTDRLYLYFIQGGIDLYTGHPLNIDQLSSYDIDHILPQSFLLDNSLNNRVLTSQAENRVHKEDRLPGETVANKMRPTWKMMREQGLMTQRKYNNLTLKPDQISKFNNRGQFINRQLVETRQVIKLAADIMSQKYQADQTKVVTVKANLTHHMREKFNFYKSRNVNDYHHAFDAYLTLFVGNWLLKEYPKLQPYFVYGDFAKTGTNNLKSFNFLYRFERDHKLNDKGAIDTDKDQQLGYMKRIYRFKKMLVTKQLETNEGALYGQTLYPAPKNDKKTRNLINSKKNRPSDIYGGYSNENGSFLTLVKLKKGSKYDYRLVAVPVSKISEIKESELATIEKAIAPQFLKSSGKYRDFQVVLSKILINQKVIDDGMIFTIGSKSYKHNAKQVVLSDNSIQIVSTLSRISDKEKLITVFDEIVDITSKYLPWYKVNDVEKTKMLFRQMQDIDEMKKIIDNSLIGLHCNASITDLGKVGLSKYWGRFVLTAGISLTVDAQLIYQSPTGLFEHRVKVSDL

SEQ ID NO: 499 - protein, 1386 aa, Lactobacillus hominis
MTKITEDYIVGLDIGTNSCGWVAMDSKNTILRMHGKTAIGSHLFDAGNSAADRRAFRTTRRRIKRRKWRLKLLEEIFDSHLAKVDPYFFARLKESGLSPLDTRKNVSSIIYPTSLEDKKFYVDNPTIYHLRYKLMTEDRKFDLREVYLAIHHIVKYRGNFLYNTPVKAFEASKIDVKGSLKKLNELYEGLDSEFNVELDSNNALEIENIIRDKKIFKINKVKEINQLLSLKTEDKERTKLMKDVSKQIVNAILGYKTKFETILLKDVSKDEADDWEFKLTDVDADNKFENLIGDLNENEQEILLVIRKLANAITLSNIVEEGKTLSESMKDKYKKHSDDLKLLKQVISDHPDRDKAKKLALAYDLYVNNRHGKILQAKDILEKKKTLSKEDFYKEIKKNLDDSKESQEILDAISLDSFMPKQRTNENGVIPYQLHQLELDKIIENQGKYYPFLKEVNPVSSHLKQAPYKLDELIRFRVPYYVGPLISPNESTKNKQTKKNQNFAWMIRKEQGQITPWNFDQKVDRMASANKFIKRMTTIDTYLLGEDVLPANSLLYQKFTVLNELNNVKINGKRISVPLKQELYNNLFKKNSTVTTNKLKSYLKENYKLIKVEIKGLSDEKKFNSGLTTYNKLKNLKIFDQQIDDPNYNKDFERIIEWSTIFEDKAIYKEKLKTIDWLSDRQIDKLSKIRMQGWGQLSKKLLSQLTDNNGQTIIEQLWDSQNNFMQIVNQADFKDAIAVANQNLLVDTSVEDILNEAYTSPANKKAIRQVVKVVDDIVKATSGKVPKQIAIEFTRDADDNAKISQSRANKLRKVYKEMSNELASETIRNELERVAKDQKLLKDKHYLYFMQLGRDAYTGELIDIDNLEQYDIDHVLPQSFIKDDSLENRVLVKKAVNNGKSDNVPVKLYGNRMATDLGMTIRHMWEKWKEQGLITKTKYNNLIIDPDKINKYESSGFIHRQLVETSQIIKLVSTILQSKYPDTEIIVVKARYNHYLRKRLNLYKSREVNDYHHAIDAYLSAICGNLLYQVYPYLRPFFVYGQYKKFSSEPEKEKIIYDKTRRYNFISQIFENKDNDIISRETKKKVFDKKDIIEKLKRAYNYKYMLVSRETETHDQEMFKMTVYPRLSRDTKKSRNLIPKKKDMPTEIYGGYTNNSDAYMIIARINKKKGPEYRVFGVPMRELVNLRKAEKNGHYKAYLKQVLEPEIMYSKNGKKNKTISSFEIVKAKVPYKQVILDGDKKFMLASSTYVQNAKQLTLSQYSMQAITDNCENDTEEEKALVEAYDEILTNIDKYLPLFDINKFREKLHAGREKFVDLPLAEKKETILQVLNGLHDNAVMPKIKSLGLSTPLGFMQFHTGVSLSENAKLIYQSPTGLFEKRLKISDL

SEQ ID NO: 500 - protein, 270 aa, Lactobacillus iners
MITYLKDNDDITLSFPKDQLINIFKNSNLNSTEKSDQLKPFFGRTNLEKGIIKLLSGGKQDLSNMFRDETLKNSNYKNLKFSDNRFDDERDGYAADLGDRIDLLILLKQIYDASILESMMSQARVSIDGHKYISSAKVCAYEKHKSDLKRLKSLIKKYLPSEYNNIFRKITEKDNYVAYSKSNITNNKREKALKYVKYVDFTKYLTKKLKTIKTQDAEDDQEIFEIKGELEKQSFLPKQRTLDNSIIPYQLHLMELKKYLIINLNIMTFC

SEQ ID NO: 501 - protein, 255 aa, Lactobacillus iners
MITYLKDNDDITLSFPKDQLINIFKNSNLNSTEKSDQLKPFFGRTNLEKGIIKLLSGGKQDLSNMFRDETLKNSNYKNLKFSDNTFDDERDGYAADLGDRINLLILLKQIYDASILESMMSQARVSIDGHKYISSAKVCAYEKHKSDLKRLKSLIKKYLPSEYNNIFRKITEKDNYVAYSKSNITNNKREKALKYVEYVDFTKYLTKKLKTIKTQDAEDDKEIFEIKGELEKQSFLPKQRTLDNSIIPYQLHLME

SEQ ID NO: 502 - protein, 343 aa, Lactobacillus iners
MLAKDDQEGITVKDKIISLLTFRLPYYIGPVNPAVHGKFAWVKRLANGKVTPWNYKEKIDIDASHEEFIKTKLSKCSFLIGCDVLPKNSLLYQKYMVLSELNTIKFNGVNISEKLKDDIYQNLFKNIQKVTKKRLQNYIKEHENIIGDVIVTGIDNAFKQGLVSYLKFKKIIGDKIDDDRYQKVLEKIIRDITLYDECAGKKIKKEYKDSDLFTEDELNKIVKLTFNDWGRLSAELLDQLEGEDTVSGETGKIIEFMQKHNYNLMQLMSKKFTFKYKIDEINKSYYQHDKFNYKSMIDSLYVSPATKRILWQSLKVVHEISKIMKHDPEKIFYRNGTFQRRSS

SEQ ID NO: 503 - protein, 447 aa, Lactobacillus iners
MLYDHKLIGDKKYARLIRSKAFTDDELAGFIARQLVETRQATKETADLLKRLCPKSRIVYAKAQNASIFRQKFDIPKSRTINDLHHAQDAYLNIVVGNIFDTKFTQDPRNFIKNTKDSRNYNLEKIYDYNVERNNYVAWIAPDSKTNGTIANVKCNLSTKDFRVTRPSFYKKGALFNQNLSRKGSNLAPIKEHSPKSNPLKYGGYSGKNNSFFVVVAGKDNKGKDIVKLIPVNTLIYNKMLHCDYKAKQELLTSYVANNFAINNFRIVKDDIKMYSLVKIDGAYYYLVGGTDERIEVKNAMQLLLSKDSIKAVKILEKESKDQFANIKNYKDIDIKLGRTFNEVISKYTNSVFGKSMLISDKYRKDIFKSVDKSILEFNSLNTIAKADNLLKFVTSMRPAGSVDALKMVGLIERIRKSNVISNFNEFKLINQSVTGLFENEEDLLKL

SEQ ID NO: 504 - protein, 667 aa, Lactobacillus iners
MQKHNYNLMQLMSKKFTFKSKIDEINKSYYQHDKFNYKSMIDSLYVSPATKRILWQSLKVVHEISKIMKHDPEKIFIEMARSKEDHPKRKLSRKADLKQVYKDSKKQIISIIGKDKYQDLSNELDNKDDRDLRWDNLYLYYTQLGRSMYSLKPIDISELMNKNLYDQDHIFPKSKKYDDSIENRVLVEKELNVKKSDIYPISDANIIPQKIKGQVESFWKMLYDHKLIGDKKYARLIRSKAFTDDELAGFIARQLVETRQATKETADLLKRLCPKSRIVYAKAQNASIFRQKFDIPKSRTINDLHHAQDAYLNIVVGNIFDTKFTQDPRNFIKNTKDSRNYNLEKIYDYNVERNNYVAWIAPDGETNGTIANVKCNLSTKDFRVTRPSFYKKGALFNQNLSRKGSNLAPIKEHSPKSNPLKYGGYSGKNNSFFVVVAGKDNKGKDIVKLIPVNTLIYNKMLHCDYKAKQELLTSYVANNFAINNFRIVKDDIKMYSLVKIDGAYYYLVGGTDERIEVKNAMQLLLSKDSIKAVKILEKESKDQFANIKNYKDIDIKLGRTFNEVVSKYTNSVFGKSMLISDKYRKDIFKSVEKSILEFNHLDTIGKADNLLKFVTLMRPSGSAHSLKMVGLIERIRKSNVISNFNEFKLINQSVTGLFENEEDLLKL

SEQ ID NO: 505 - protein, 1395 aa, Lactobacillus jensenii; identical to SEQ ID NO: 118

SEQ ID NO: 506 - protein, 1382 aa, Lactobacillus mucosae
MDIGTNSIGWTAIDDHFSLLRVKGKNAIGVRTFKEGETAADRRGFRTARRRLSRRRWRLQFLDEFFAPYLAEVDPNFLARLKQSDISAKDPAKNQEYMGKLLFPDQEAASDGNGYPTLIQMRKAMPAEKAADFPVFNIYQLRYALMNEKRKFDLREIYLAVHHIVKYRGNFLNNTSVDKFKADQIDFNKSFETLNDLFRQVQPIAPFQIDLTKVDELGKLLLDTKQKKLDRQKAVAKLLPLIEDGTDKEIVKAHQQTAREISKLILGYKAKVGLILQNNLDQTLDMSTENSDDQLMQIAEELDDYQMELINQLSLLYSQIMLNEIVPNGETVSASMLNRYYKHRCQLKELKDYGAAQDKKTREQLDHLYAEYIGQIPKDSKFDFTKDLKKLMDKSDLGQKIKDEIEAGDYLPKQRTSANGVIPHQMHQQELDQIIENQKEYYPWLAEPNPVEKNIKNAKYKLDQLVSFRVPYYVGPMITLADQQKTSKASFAWAVRKKAGKITPWNFYDMIDREKSANNFIKRMTNKDTYLLSEDVLPASSLLYQKFTVLNELNNIRVNGRKLQPALKQAIYTDLFQKRKTVNLKTLTNFLAIHEPTLTKPKIEGLSNGRSFNSSLGTYIDMSKILGDSLDDLNYRDDIEKIIEWSTVFEDSEIYGVKLQEIQWLTNEQREKLVRKRYQGWGRLSKKLLTGITDENGQRIIDLMWDTSKNFMQIVHQPVFEEQIAELNQQLLQDADKAPLEVVDDILADAYTSPQNKKAIRQVVKVVADVVKAVGNAPASISIEFARNEDRNKELKNSRRHSIEKLYHETAEKLVKQTNLLEELGNVKDLNDRYYLYFTQAGRDMYDGTPINIDEISTHYEIDHILPQSFLKDNSLDNRVLVKKSENAAKSDRVPAKLYGAKMRAFWKQLKESQLISNRKYLNLTTDPEQVDKYQMQGFVHRQLVETRQIIKLAANIFGSLYPDSAVIETRAELTKQLREKFSLYKVRDVNDYHHAVDAYLTAFAGHYLYQRYPKLRPMFVYGDYAKIYADDLKRLRSVNLFHDLEKDQYNSGTAVNPETKEKIVDVDWLSDYVSKIQHFKYMLISKAVYTQHGQLYGATILPVAQVDKISAPIGIKDDKPVDIYGAYTNEVAAYMAIVRVNGKKPKYKVVSVPVRMLQRLKMAEQKGHDQYMQTLHDVLLRNFTSLKKNRKTGLKEAVVKDFDVLVPCVRYNQLVIDGDTKFTLGSATYQHNAKQLVLCNHSLETLANNFEYVRKHPDEADERMIMLYDDILDQVNHYFTLYDKNKFREKLNAGRDKYLKLPTFSQFENNKKTAIGKSEAIINILRGLHANAAITNLKCLGVSTPFGQLQSPSGIELSENAKLVYQSPTGLFSREVLLKDL

SEQ ID NO: 507 - protein, 1382 aa, Lactobacillus pentosus
MKKIVNYNLGLDIGTSSIGYAAIDDQGRPVRHQNKTVMGVRLFKEGKTAESTRIFRGTRRRLSHRHWRLGYLDRIFDNEIAKVDENFLPRLKASKRARSDEKRSFRGSLLFPETGDDAYYQKYPTIYHLRYALITQKKQFDIRLIYLALHHMIKYRGNFLDTTPVSAFNIHDIDLTDQFASLNDCYQLLDMDFEFQFDLNNIEQVQKLLLDETLSKTKRQAAVSKVLVMSTGNKAFDDQQNGIASEFIKALLGGPFDLSKILNLSVADVKSWKLHMTDKDVDDTLNSLVEELDENHKQIVNLLQMIYSQVMMLGLLNGQQSISASMIERYDDHAKHWAALKKLLPALGEQEQSTIIHAYTAYTGHSRTKQLSRAEFYTKVNSILKKHENIAEATGLIELIDRNEFMPKQRDAVNGVIPHQLHQRELQLIIQNQQKYYPFLAAKAYPDADETMIEQLLSFRVPYYAGPLVDRDFINESSDQEQAMQNTKFSWLKRREAGEITPWNFEQKVDVQETANRFIKRLTTKDTYLMTEDVLPKESLIYQRFEVLNELNAIRINDRRLTAENKQLAFQQLFMAGNTKNVSIKKFRNFVFDSLKFPEKVKITGFAGQHNFLAKLSTYHDFKKIFGERVDHTDLQPDFERIVEWCTIFEDRHIYREKLKEIQWLSQSEIDQLVLIRNHGWGRLSKRLLTGIRDSDGRTVMDQLWFGTDNFMRIISQSDFAAAIANENRTQLNQHGLEDVLDSAFMSPQNKKAIRQVLKVVDDIEQTLGCPPKKVMIEFTRSPDKKKQRTVTRLEKVQQAYKAVADQLAGQSIVSELDQYANTHSKLSDTYYLYFMQLGRDLYSGKPIDIDSPMLDDDHILPRAFMKDNSLDNRALTEKPINNTKAAKFPSKVFGQQKEVTDFWKLLRRCGLMSNIKEKHLYLDPDNVDKWTRRGFIHRQLVETSQVIKIVANILNDRYQQSQTEVLEVPARLGTELRECFGWYKVREVNDYHHVFDAYLAAFIGNYLYRRYPKLQPYFVYGNFAELNKAQLKNIKSFNFLYNITDNKRVVKDIETGQTLWDDQIRQQIQHIYEYKYMLTSHEAFTQHKELYGQTIYPRREFKPGTLKAIKQDQPQELYGGYKNLTAAYMCIVKIQARKRRAAEYRVVRVATESLSALQQAKRLGVQAYERCLRQELVRNNEILRTNADPNSAPREFEVLLDRVLCHQMIISDGQKYLLGSHAYKINCMQLVLSNNSMKILSTSIVKLKQMTNEPLVQVYREILDVVNKYFTLYDVNSFRENLNQFFDKFRTLPITNEYESSKSGKKLIHRGQLETLTLILRGLHANSDKVQYGDQSTLLGGFQTKDGIKLSKDSVIQYTSPAGLNVRTVKLRDLEQKEAQK

SEQ ID NO: 508 - protein, 1361 aa, Lactobacillus pentosus
MNEPYGVGLDIGTNSVGWTVVDMNGRVRKVKGKTALGARLFKEGATAEDRRGFRTTRRRLKRVKWRLRLLREFFDQPISKIDPNFFARRKYSDISPRDPNYNGLAKTLFNDRTDKEFYDDYATIYHLRDKLMTSNRKFDIREIYLAIHHIVKYRGNFLRTGPASQYGSASLHLATSFQKLNDLFAQSEETLNLKLVTDEALLQQIQQILVRTDLSRSEQQRQIWPLMAVLTGASAAEKKRQKNVVVELSKALVGLKAKMNVVTLTEVDAAVVKDWTFTMEESQDKLPEIEEQLSEVGQQIMDEVIQLYASVNLAQLIPAGKRFSQHMVEKYKHHEKNLELLKAYIHSQSDSKRGREIRATYDRYIDGVDSKPVTQEMFYKDLMKYVEADATSNHLAAEIKDEIDSEQFMPKLRTKQNGSIPYQVQQYELDQIISHQKKYYPWLGEENPVAERRGKFPYKLDELVGFRVPYYVGPLITKEDQQATSGAGFAWMVRKADGPITPWNFDQKVDRIASATAFIQRMQTTDTYLIGEDVLPARSLIYQRFMVLNELNNMRVEDRKLAPQQKQRLYNQVFKQHQHVSVKNIQQNLMDAGEYRKTPQITGLADPKGFNSSLSTYHDFKKILLEAIADEHKRADIEKIILWSTTFEDSAIFKQKLEEVAWLTDAQRKQLSGLRYRGWGQLSHKLLTAFKDDKGRSIMDGLWETSDNFMQLRKQPAIETQIKEANQANLTDADIQDTINELYTSPQNKKAIREVMLVLDDIKNAMHGQTPSWIFVEAARGGGVAGRRTQSRSSQIVEAYKGTAKEIVSEKVQHELNEKIKAKADFNTRLVLYFLQNGRDLYTNEAINIDRLSEYDIDHILPQSLVKDDSLDNRVLTSARINREKNDTFASEKFGRKMGAQWRELHRNGLMTQRKLKHLLMRPDEISKHATDFINRQLVETRQVIKLVEELISSEYPAASIVAVKANLTHQFRQTFNFPKLREVNDYHHAFDASLTAFIGMYLLKQYPKLERFFVYGKFAKQPINLTRFNIIRKLAVAEKPIANIETGEILWDKTADIKYFEKLYNYKRLLVTHEVRENYGAMFKQTLFKASYNKSKTLVPKKNHMETSVYGGYSNQETAYLAIVRIPFKSGFKFIVVGIPTRMVAKIKHYQSLGATLNQATHKVIEPKFTKISRKTKQTVISDYEVVLPKVYLDQVVRDQVKGQMYRFSLGSDKEYHNVQELYLPLSIQQAFVGHYDESDDQRSNDLVKVYDAALKQLQRYFPLHLSRNFDQVASQAHQSFEGLKNNVQTSDKQLGKKEVLNSLFVGLHANATRSNLSVLGMSKDFGRIKSNGITLTDQAEIIYQSPTGLFERKVALKDL

SEQ ID NO: 509 - protein, 1358 aa, Lactobacillus pentosus
MNEPYGVGLDIGTNSVGWTVVDMNGRVRKVKGKTALGARLFKEGATAEDRRGFRTTRRRLKRVKWRLRLLREFFDQPISKIDPNFFARRKYSDISPRDPNYNGLAKTLFNDRTDQEFYHDYPTIYHLRDKLMTSDRKFDIREIYLAIHHIVKYRGNFLRTGPASQYGSASLHLATSFQKLNDLFAQSEESLNFKLVTDEAQLQQIQQILVRTDLSRSEQQRQIWPLMVVLMGATAAEKKRQKDFAKELANALVGLKAKLNVVTLTNVDTTVVKDWTFTLEESQDKLPEIEEQLSEVGQQIMDEVIQLYASVNLAQLIPAGKRFSQHMVEKYNHHEKNLELLKAYIHSQSDSKRGREIRATYDRYIDGVKSKPVTQEMFYKDLMKYVEADATSNHLAAEIKDEIDSEQFMPKLRTKQNGSIPYQVQQYELDQIISHQKKYYPWLGEENPVAERRGKFPYKLDELVGFRVPYYVGPLITKEDQQATSGAGFAWMVRKADGPITPWNFDQKVDRIASATAFIQRMQTTDTYLIGEDVLPARSLIYQRFMVLNELNNMRVEDQKLAPRQKQRLYNQVFKQHQHVSVKNIQQNLMDAGEYRETPKITGLADPKGFNSSLSTYHDFKKILPEAIADEHKRADIEKIILWSTTFEDSAIFKQKLEEVAWLTDAQRKQLSGLRYRGWGQLSHKLLTAFKDDNGRSVMDGLWETSDNFMQLRKQPAIETQIKEANQANLTDADIQDTINELYTSPQNKKAIREVMLVLDDIKNAMHGQTPSWIFIEAARGGGVAGRRTQSRSKQIVEAYKSTAKEIVSEKVQHELNEKIKAKADFNTRLVLYFLQNGRDLYTNEAINIDRLSEYDIDHILPQSLVKDDSLDNRVLTSARINREKNDTFASEKFGRKMGAQWRELHRNGLMTQRKLKHLLMRPDEISKHATDFINRQLVETRQVIKLVEELISSEYPSASIVAVKANLTHQFRQTFNFPKLREVNDYHHAFDASLTAFIGMYLLKQYPKLERFFVYGKFAKQPINLTRFNVIRKLAVAEEPIANIETGEILWDKTADIKCFEKLYNYKRLLVTHEVRENYGAMFDQTIFKATDSRKRLIQKKKGFATETYGGYTGRTLAYLAIVKVVTNKDTQYQVVGIPTTMVTQIQQLEASGLTSKQAVTKAIGAMINENNKKLQSYEVLLPKVRFEQVVRDEVKGHIHRFALGTDTYYHNIQELYLPLTIQRAFLGKRNDTDAQTEQNLLTVFETTLAQVNRYFPLYEMNKFKQILNSAQEKFAALPTKNKTVKNKLVTGKDGVLNNLFIGLHANASLGDLKILGMKIGFGKLQVPGGLKLTDQAEIIYQSPTGLFERKVALKDL

SEQ ID NO: 510 - protein, 1358 aa, Lactobacillus plantarum
MKEPYGVGLDIGTNSVGWTVVDASGHVRKIKGQTGIGVRLFKEGAAAADRRGFRTTRRRLKRVKWRLRLLREFFDQPISKVDINFFARRKYSDVSPRDPNYNGLEKTLFNDRSDQDFYHDYPTIYHLREALMTQHRKFDVREIYLAIHHIVKYRGNFLRNDAATAYRSGTLDLQQHFETLNHLFSQADLELNLNLTTDVALLDSIKQTLVRTDISRSDRQKLIMPLLAVLTGATTAEKKRQKAVVTEFAKALVGNKTKIDVLTLTDIDATEAKDWAFSLEENQDKLPGIEDRFSEVGQQIIDEVIRLYASVNLAQLIPEGKRFSQSMVEKYKRHGEDLKLLKAYIRSQSDAKRGRAIRATYDQYIDGVKSKQVTQEAFQKALGKFVDADVDLNSWAAQIKQAIDSEQFMPKLRTKQNGAIPYQVQQNELDQIISNQKEYYPWLGEENPVIKRRGKFPYKLDELFGFRVPYYVGPLITKEMQAATANAGFAWMVRKADGPITPWNFDDKVDRVASATAFIQRMQTTDTYLIGEEVLPARSLIYQRFMVLNELNNIRVDDGQLTPRQKQRLYNQVFKKHKRVTAKNIQDNLVAAREFPTAPRITGLADPKVFNSSLSTYHDLKQVLPEAMSDVRKQADIEKIILWSTIFEDSTIFKQKLTEISWLTAAQLKQLGQLRYRGWGQLLRKLLTGLKDDNNRSIMDGLWETNANFMQLRSQPAIENQIKSANQANLTTADLQDTINELYTSPQNKKAIREVMVVLADIKDAMHGQTPNWIFVEAARGGGVAGRRTQSRSKQIVAAYQGTAQAIVRDQVQRELKEKIKNKANFNTRLVLYFLQNGRDLYTGDAINIDRLSEYDIDHILPQSLVKDDSLDNRVLTNARINREKNDTFASEKFGKKMGAKWKEMHRMGLMTKRKLDHLLMRPDEISKYATGFINRQLVETRQVIKLVEELINAEYPSTAIVSVKANLTHQFRQTFDFPKIREVNDYHHAFDAALTAFIGTYLLKRYPKLERFFVYGKFAKQPVNLTRFNVIRKLAKTDTPITDIDTGEVLWDKLTDIKYFETLYDYKRLLVTREVSENYGAMFDQTLLKASDNGKRLIRKKQSFDTAIYGGYTGKTLAYMAIVKVSTKKDVQYQVVGVPTTMVTQIEQLEQQGMTNKQAVTKVIEPLIAANNKKMLTYEVLLPKVRFEQVVRDRIKGQTHRFALGTDTYYHNIQELYLPLTLQRAFLGKQNESEVQLNQNLLTVFDATLAQVNRYFPLYEMNKFKKILNSARDQIELLEAKNQFVKNKLVLGKQGILTNMFIGLHANASYGDLKVLGVKIDFGKLQVPGGIKLTGDAEIIYQSPTGLFERKIALKDL

SEQ ID NO: 511 - protein, 1361 aa, Lactobacillus rhamnosus
MTKLNQPYGIGLDIGSNSIGFAVVDANSHLLRLKGETAIGARLFREGQSAAERRESRTTRRRLSRTRWRLSFLRDFFAPHITKIDPDFFLRQKYSEISPKDKDRFKYEKRLFNDRTDAEFYEDYPSMYHLRLHLMTHTHKADPREIFLAIHHILKSRGHFLTPGAAKDFNTDKVDLEDIFPALTEAYAQVYPDLELTFDLAKADDFKAKLLDEQATPSDTQKALVNLLLSSDGEKEIVKKRKQVLTEFAKAITGLKTKFNLALGTEVDEADASNWQFSMGQLDDKWSNIETSMTDQGTEIFEQIQEHYRARLLNGIVPAGMSLSQAKVADYGQHKEDLELFKTYLKKLNDHELAKTIRGLYDRYINGDDAKPFLREDFVKALTKEVTAHPNEVSEQLLNRMGQANFMLKQRTKANGAIPVQLQQRELDQIIANQSKYYDWLAKPNPVEKHRASKPYQLDELLTFRIPYYVGPLITPKEQAESRENVFAWMIRKDPSGNITPYNFDEKVDCPASANMFIQRMKNTDTYLIGEDVLPKRSLLYQKYEVLNELNNVSIDGRRLGADQKQRLIREVFERHSSVTIKQVAENLVAHGDFAKRPEIRGLADEKRFLSSLSTYHQLKKILHEAIDDPTKEHDIENIITWSTVFEDAAIFKTELAKISWLDSDTIKALSNIRYRGWGQFSRKLLDGLKLGNGHTVIQELMLSNHNLMQILTDETLKTTMAELNQDKLKADDIEDVINDAYTSPSNKKALRQVLRVVEDIKHAANGQDPSWLYIETADGPGTAGKRTQSRQKQIQTVYANAAQELIDSAVRGELEDKIADKASFTDRLVLYFMQGGRDIYTGAPLNIDQLSHYDIDHILPQSLIKDDSLDNRVLVNATINREKNNVFASTLFASKMAATWRKWHEAGLISGRKLRNLMLRPDEIDKFAHGFVARQLVETRQIIKLTEQIAAAQYPNTKIIAVKAGLSHQLREELDFPKNRDVNHYHHAFDAFLAARIGTYLLKRYPKLAPFFTYGEFAKVDVKKFREFNFIGALTHAKKNIVAKDTGEIVWDKERDIQELDRIYNFKRMLITHEVYFETADLFKQTIYAAKDSKERGGSKQLIPKKQGYPTQVYGGYTRENTAYLAVVKTVEKKADVYRVVRIATSQVAALKEARAQSTVKERELLKKFLTTKFTKIGKNGKKAITPFDIVIPRVPREQLFHNKRYGFFMVNSDTLMHNYQELWMSRSDQQILSKLVKSAKTVENGQVGRLFENIVEQINKYFPLYDINQFRKKLDQSKDIFSKLPLEGNGTTSGKRETIQNILTGAGTGAKNGDLKNLGIKTPFGFLQVPSGIVLDDDTTLIYQSPTGMLNRIVRLSEL

SEQ ID NO: 512 - protein, 1361 aa, Lactobacillus rhamnosus
MTKLNQPYGIGLDIGSNSIGFAVVDANSHLLRLKGETAIGARLFREGQSAAERRESRTTRRRLSRTRWRLSFLRDFFAPHITKIDPDFFLRQKYSEISPKDKDRFKYEKRLFNDRTDAEFYEDYPSMYHLRLHLMTHTHKADPREIFLAIHHILKSRGHFLTPGAAKDFNTDKVDLEDIFPALTEAYAQVYPDLELTFDLAKADDFKAKLLDEQATPSDTQKALVNLLLSSDGEKEIVKKRKQVLTEFAKAITGLKTKFNLALGTEVDEADASNWQFSMGQLDDKWSNIETSMTDQGTEIFEQIQELYRARLLNGIVPAGMSLSQAKVADYGQHKEDLELFKTYLKKLNDHELAKTIRGLYDRYINGDDAKPFLREDFVKALTKEVTAHPNEVSEQLLNRMGQANFMLKQRTKANGAIPVQLQQRELDQIIANQSKYYDWLAKPNPVEKHRASKPYQLDELLTFRIPYYVGPLITPKEQAESRENVFAWMIRKDPSGNITPYNFDEKVDCPASANMFIQRMKNTDTYLIGEDVLPKRSLLYQKYEVLNELNNVSIDGRRLGADQKQRLIREVFERHSSVTIKQVAENLVAHGDFAKRPEIRGLADEKRFLSSLSTYHQLKKILHEAIDDPTKEHDIENIITWSTVFEDAAIFKTELAKISWLDSDTIKALSNIRYRGWGQFSRKLLDGLKLGNGHTVIQELMLSNHNLMQILTDETLKTTMAELNQDKLKADDIEDVINDAYTSPSNKKALRQVLRVVEDIKHAANGQDPSWLYIETADGPGTAGKRTQSRQKQIQTVYANAAQELIDSAVRGELEDKIADKASFTDRLVLYFMQGGRDIYTGAPLNIDQLSHYDIDHILPQSLIKDDSLDNRVLVNATINREKNNVFASTLFASKMAATWRKWHEAGLISGRKLRNLMLRPDEIDKFAHGFVARQLVETRQIIKLTEQIAAAQYPNTKIIAVKAGLSHQLREELDFPKNRDVNHYHHAFDAFLAARIGTYLLKRYPKLAPFFTYGEFAKVDVKKFREFNFIGALTHAKKNIVAKDTGEIVWDKERDIQELDRIYNFKRMLITHEVYFETADLFKQTIYAAKDSKERGGSKQLIPKKQGYPTQVYGGYTRENTAYLAVVKTVEKKADVYRVVRIATSQVAALKEARAQSTVKERELLKKFLTTKFTKIGKNGKKAITPFDIVIPRVPREQLFHNKRYGFFMVNSDTLMHNYQELWMSRSDQQILSKLVKSAKTVENGQVGRLFENIVEQINKYFPLYDINQFRKKLDQSKDIFSKLPLEGNGTTSGKRETIQNILTGAGTGAKNGDLKNLGIKTPFGFLQVPSGIVLDDDTTLIYQSPTGMLNRIVRLSEL

SEQ ID NO: 513 - protein, 1352 aa, Lactobacillus ruminis
MNDNFDLMRVKGKKGIGVRLYNEGQSAAERRMHRTARRRYGRRKWRLRLLEDFFDEHMAEVDDTFFARLKDSNISPKDDKKYRKSLLFPKSKGVTYQDDGEFYKKYPTMYHLRYALMTEHRKFDLREIYLAFHHMVKYRGNFLYDTSVDSFEAKNLDIKGKFDEINDLLSSYTDFYVDNSNAALVESILLEKNTTRKDKSKKIAKLLHVEDKEKGKNKKAKDLATQISNAVLGLKCNFHLIFELQQKYSFDLCSEKTEENIAKLSEVLDENQKMLLMILKEVQDQVMLNAFVPSGMSLSEAMMQKYDDYGEQLKIYHELEHSVSDDSAAKLRGAYRDYNDNIIKRIDGDNKKDTFYKRVKNILTKISKEYVDQDVLESCGKLKKLIDENKLFIRQRTAANGVLPHQLHQIEMRKIIDNQKEYYPWLAEPNPNEKRRVYSKYKVEELIAFRIPYYVGPLVDPNNADKNKEARFSWMVRKKDGEITPWNFYDKVDWAESANNFIERMKSKDTYLLGEDVVPKESMLYQKYEVLNELNNLRINDSGLSDSFEDVKLKQAIYNDLFKKQKIVKITDLQNYLVQNHKYLVKPKISGLADENRFLSSLSTYSDLKTIFGDKVDDRTYFNDFEKMVEYSTVFEDGHDYNQKLDEYTWLTKEEKYKIGKKRYRGWGKLSKKLLTGLRDKNNHTIMDNLWETNRNFMQIQTADEFSKQIAEENERHLKGSVSDAINDMYTSPANKKAIRQVLRVVDDIQKAMGYAPSSISLEFAREDGPSVRTVSRANRMKSIYEKYASEVSEEVMKDLDGVIKDKKGLNDRLYLYFEQQGKDMYSGHPLDFDKVISGQEYDIDHILPQAVIKDDSLDNRVLTTKALNNDVKSKGVPCRMFNGMHSFWKNLYDKGFISRRKFNNLTTNPENIDKYKMKGFVNRQLVETRQIIKLVANVLNDKYQNDDVDIIEVRAELTHDVRKHFKFYKNRNVNDYHHAFDAYLTSFIGHYLFKKYPNLRPLFDYNDFMKVSDNVFKQLRGNNFLGEFLNKTGDIISTDGNFVLNKEEMINKLNKAYAFKKILVTKEVGQRTGAMFNETRYPAPNSRKAALKYRRMPKPDSLISVKDYKNTDIYGGYSGKNDAYMVIVDMGKQYMVVGVPVRYTEKLDKLRIKHSELYRDELRKVLSRDKTLLDSKGNVKRFDIVLDRVLYGQLIEDGNELFTLGSSKYKRNFRQLFLDKQCIEILDSSATPQPTDEELIWVYDQILDKVDKYFELYDINRQRETLRKGRAAFCSLPNISMKKDDVTKKKILNEILVALHANESESNCEKIGKKVFGRLQVPGGIKLSKEAKLIYQSPTGLFERVVYLKDL

SEQ ID NO: 514 - protein, 1339 aa, Lactobacillus salivarius
MERYHIGLDIGTSSIGWAVIGDDFKIKKKKGKNLIGTRLFNEGATAAERRGFRTQRRRLNRRKWRLKLLEEIFDPYMAEVDEYFFARLKSSNLSPKDSNKKYLGSLLFPDKSDSNFYDKYPTIYHLRRDLMEKDEKFDLREIYLAIHHIVKYRGNFLEKVPAKNYKNSGASIGFLLEEVNSLYKDIIGDESIAILNSEKFEDVEKIILDEETRNLDKQKSVGKLLVEDKKKKNIVTAFSKAIFGYKFNIEDLLLIENDEKNKLTFNDENIDDIFNELSHSLDDKQMDLLTKTREIYFKFKLNMIVPTGYTLSESMIEKYEMHKAHLKMYKEFINTLNTKDRKILKNAYSDYINTEKAKAANAQENFYKTVKKIIKDNNSDTAKKIIVLIDEGNFMPKQRTGENGVIPHQLHQIELDRIIENQAKYYPWLAEANPVEKNRKFAKYKLDELVTFRVPYYVGPLIDKTESNKNEKETKFAWMVRKAKGTITPWNFENLVDRTESANRFIKRMTSKDTYIIGEDVLPASSLLYEKFKVLNELNNIKVNEKKLDIEQKQDIYLNLFTTAKNVTKKSLATYLNCSADSISGLSDGEKFNSSLSSYIDLKAILGNIVDDCNKNEDLEKIIEYSTVFEDGNIYKEKLSEISWLTDEQIEKLSNIHFKGWGRLSKKLLTQITNENGERIIDALWNTSNNFMQIINDESIQAKLAEINGKYAGKSDLEDILSEAYTSPQNKKAIRQVMKVVEDIEKAMQCEPTSISIEFTRKKQKSRLTNTRYKKISDVYEKIADEVISEYELRKLQSELDSNANNMRDRYYLYFMQLGRDMYTGEKINIDELHQRYDIDHILPQSFIKDDSINNRVLTRKDVNNKEKSDKTAADLYAVEMSDFWRKLRKQGLITEQKYKNLLTKSDSIDKYAKKGFIKRQLVETSQVVKLVANILQDKYSDTKIIEVRAKLNSNLREEYKLIKNRAVNDYHHAIDGYLTTFIGQYLYKTYPKLRSYFVYNDFKKLDSNYLKHMKKFNFLWQLQDDKTIDIYDNVNNKFVLNVPEMKKYIQKIYNYKYMLVSKEVTTKNGAFYDQTKYNAKTVNLIPIKKNKPTNIYGGYKGKVSSYMMLVKIRKKKEVIYKFVGVPRLWTDELDRLKDTTERKILLNEIAKNSLSKTEQDFEVILDKVYYGQLIIDGNQKYTLGSSEYKYNAMQLHLSKHALEVLAKENVKDAEITDKDLVSVYEEILSVVNKYFELYDINKFRQKLNEGLEIFRKLPVYNVYESNKIKQVGKFEVLNRILMGLHANAMITDLKVLGIKTKLGQMQVNGGIKLSPDAKLIYQSPTGIFSRAVRVKDLG

SEQ ID NO: 515 - protein, 629 aa, Lactobacillus salivarius
MERYHIGLDIGTSSIGWAVTGDDFKIKRKKGKNLIGTRLFKEGNTAAERRGFRTQRRRLNRRKWRLKLLEEIFDPYMAEVDEYFFARLKDSNLSPKDSNKKYLGSLLFPDISDSNFYDKYPTIYHLRRDLMEKDEKFDLREIYLAIHHIVKYRGNFLENVPAKNYKNSGASIGFLLEEVNNLYKDIVGDENVTILNSEKFEDVEKIILDDGIRNLDKQKGVGKLLVEDKKNKNLVTAFSKAIFGYKFNIEDLLLVEGDEKSKLTFNDENIDDIFNELSHSLDDRRMDLLTKTREIYFKFKLNMIVPTGYTLSESMIEKYEIHKAHLKMYKEFINTLNSKDRKILKNAYTDYINNEKAKAANAQENFYKTVKKTIKDNDSDIVKKIIDLIDEGNFMPKQRTGENGVIPHQLHQIELDRIIENQAKYYPWLAEENPVEKNRKFAKYKLDELVTFRVPYYVGPLVDKTESNKNEKETKFAWMVRKSKGTITPWNFENLVDRTESANRFIKRMTSKDTYIIGEDVLPASSLLYEKFKVLNELNNIKVNEKKLDIEQKQNIYLKLFTTTKNVTKKNLATFLNCSIESISGLSDDKKFNSSLSSYIDLKVILGDIVDDYSKNEDLEKIIEYSTIF

SEQ ID NO: 516 - protein, 897 aa, Lactobacillus salivarius
  misc_feature (822)..(822): Xaa can be any naturally occurring amino acid
MLIESDEKNKLTFNDENIDDIFNELSHSLDDNQMDLLTKTREIYFKFKLNMIVPTGYTLSESMIEKYEMHKAHLKMYKEFINTLNAKDRKILKNAYSDYINNEKAKAANAQENFYKTIKKTIKDNNSDTAKKIIGLIDEGNFMPKQRTGENGVIPHQLHQIELDRIIENQAKYYPWLAEENPVEKNRKFAKYKLDELVTFRVPYYVGPLVDKTESNKNEKETKFAWMVRKAKGTITPWNFENLVDRTESANRFIKRMTSKDTYIIGEDVLPASSLLYEKFKVLNELNNIKVNKKKLDVEQKQHVYLDLFTTRKNVTKDNLATSLNCDVESITGLSDNEKFNSSLSSYIDLKAILGNAVDDCNKNKDLEKIIEYSTIFEDGNIYKEKLSEISWLTDEQIEKLSNIHFKGWGRLSKKLLTQITNENGERIIDALWNTSNNFIQIISDESIQAKLAEINGEYADKSNLEDILDEAYTSPQNKKAIRQVMKVVEDIEKAMKCKPTSIAIEFTRRKGKSKLTNTRYKKISETYEKITDELISEYELGKLQSKLDSKANNMRDIYYLYFMQLGRDMYTGEKINIDELHQYYDIDHIFPRSFIKDNSLNNRVLTRKEINNNEKADRTAADLYAVKMGDFWRKLRKQGLITEKKYKNLLTRTDSIDKYTKQSFIKRQLVETSQVVKMAANILQDKYSNTKIIEVRARLNSDLRKEYELIKNREVNDYHHAIDGYLTIFIGQYLYKTYPKLRSYFVYDDFKKLDSNYLKHMDKFNFIWKLEDKKAEDVYDNVNNEFILNVPKMKDYIQKIYNYKYMLISKEVTTESGAFYXZTKYNAKTINLIPIKKDKPTNIYGGYKGKVSSYMMLVKIQKKKEVIYKFVGVPRLWTDELDRLIDTDEKKALLKK

SEQ ID NO: 517 - protein, 1419 aa, Lactobacillus sp.
MAKPQNYTIGLDIGTNSVGWTVTDDQNNILRIKSKKAIGARLFEEGKVAAERRSFRTTRRRLSRRKWRIKLLEELFDEEISKVDPNFFARSHESWISPKDKRERYSAIVFPTPEEDKKFHNEYPTIYHLRDRLMKDDQKHDIREIYVAIHHIMKYRGNFLHDESIETYRSGMSSLGGGDERTILNTKILDDLNDAFADNLATQGISVNSASADQINEIVTSGHLNVDSQKAIAKLLLPTTLSSDDKKQDKKIKKLATDAAKNVASAWLGYKANFAAILNIQEVDKDKKKIYSFALQGADEEDKVETLESVLSQDQIEIVDRIIRIRHAIVLGEIIPVGMTLSEAMIEKYDQHAKDLKNLKTVIRNLKDRKNAVKLQAIYDLYVNNRHADTAKAMKLAGVKKRTELLEPEEFNKSIEKLLDDSPVSAEIKKRIAEKDFLPLQRSNSNGVIPNQLHQIELDEIIKKQSKYYPFLGETNEHASADVARKAPTKLDQLLTFRVPYYVGPLITKEEQEEQDGHSFAWMIRKNPKDHEKITPWNFDEKVDRMASATQFIKRMTTKDTYLLGEDVLPSSSLKYQLFTVLNELNNLRINHKKLTREEKEQVIEDLFKKYKTVKADKFKNYWQKGHAGLDVKIQGMADPEKFNSTMSTYIDLQKIFGDQLDDAQRQNDFEKIIEYSTIFEDRKILGEKLRADFVWLSEDQIKRLCRLRLQGWGRLSLKLLTRLTDADGQNVLERLLNSNDNFMQIVKDPVIKAKIEQKNQKLLRADWSENATESILDEAYTSPQNKKAIRQVMRVVHDIVKACDGNLPAKFAIEFARSQDDDPKRTVARADRLQKIYAQISDEVVSQGVKDQLSGMKSLKDRYYLYFMQGGRDAYTGKPLNIDRLSDYDIDHIMPQSFIKDDSLDNRVLVTRAVNNQKSDNVPVLLYGNHLVADLGITIREMWDRWQKSGMISKRKLANLLTDPATLSEYRAEGFINRQLVETSQVIKLTATILQSEFPDSKIIEVPAKYNSILRKQFDLYKSREVNDYHHAIDAYLSTIVGNYLYQVYPNLRRLFVYGEFKKFSHGEEESSHQAVRRVKSMNFLDDLLRGKHGDDIYCRVTGEVIFSRKDIISKLKQAYSFKQMLVTQEVFTKKSALFDQTVYPSPARDSKTRSGLIPRKQGMDTEIYGGYSGNKDAYFVLAQVVKSKGHTLQVVGVPIRALRALANCSNYSEQLLKIVKAQVLFNKKTGKAKKGISDVRILLDKIPYRQPVLDGSAFYMLGSSTYKYNLKQISLSQQSMKYILDYIDDPNFNKHEMTKIDQQNEKECLLSVYDEILDKMDKYLSLYDINGFRKKLHVGRDKFIKLEVEKQAEAIKNVLRGFHANSDMTKLSDLGLSTSLGFMQASDGIKLSDNAVFIYQSPTGLFERRVKVSDLLK

SEQ ID NO: 518 - protein, 1289 aa, Lactobacillus versmoldensis
MRRRYRRRRNRLNWLDELFADELAKIDPSFLLRMKNSWVSKKESTRKRDPYNLFIDEKYNDVDYFNQYPTIFHLRKELITEDKKVDIRLIYLAIHNIIKYRGNFTLENQNFDISQLSSNFSQQISDFFALFSDFGVIMPEDFDPDKISDILLNPNLSPSGKVSEAIATISPKTNVKAKIKIILLLLVGNNGDLKKLFDLETTEKIAVKLSSRHIDSELPIILSELNEQQENIITIANSIFGSIILKDFLGDETSISAAKVISFEDHKQDLQKLKTMWRETSNKEAVKAGKKAYEDYIGHEDSETFYKKIKKFLEKAQPVDLANKALAEIELENYLPKQRNRNNTVIPYQLNENELIAILDHQEKYYPFLKENRDKILSLLTFRIPYYVGPLQDSNNNRFSWMTRKASGAIRPWNFSEKVNVEQSSNDFIKRMRSTDTYLIGEPVLPKKSLIYQCYEVLSELNNTRVKDGSSNPKRLDVTIKQRIYNEIFKNQKSVSVKVLQNWLIKESYFKSPEISGLADKKKYLSSLSTYIDFKKIFGQRFVDDPVNSPQLEELAEWLTLFEDKKILLIKLQNSKYSYDQATINKLSTMRYQGTGKLSKKLLVDLKTTKKSIGKSGAESLSILDLMWSTKDNFMQIIHDADYTFEQQIKEFNYDTEDELTPLEKVANLHGSPALKRGLNQSIKVVADIVKFMGHDPEKIFIEFTRSDDFSKLTISRYRRIKKQYLEIAKAIKKIPAEFKDIKEYQTQLEENKGKLASERLMLYFLQCGHSLYSNKPIDLNMINSSKYHVDHILPQSYIKDDSLENKALVLASENENKIDNMLISHDIIATNLPRWQALKDQNLMGSKKFADLTRTTVTENQKKGFIQRQLVQTSQIVKNITLILNDLYKNTSCIETRATLSSEFRKAFSNFDETTYHYQFPEFVKNRDVNDFHHAQDAFLACVIGEYQLKKYPKDNLRLVYDQYSKFLDSLKKDTRKKNGRMPRYTQNGFIIGSMFNGKTYVDDNGEIIWDQKIKESIRKTFNYHQFNVVRQTIEQHGKLFNDTIQPHSDRYKLIPLKTNRDPAIYGGYNNDNNAYSVVLDVDGKKKINGIPIRIANQLKSDELDLSSWLENNIKHKKPMTILIDKVPKYQRIINEETGDLLITSANEVINNVQLFLPSMYTALISLLDSTKTEMYSKLLSNYEANILIDIYDYLLTKLKNNYPLYRKEWAKLAEHRDDFIESDLVTQASTLQQLIKFMHADPSNVNLKFGNFKGNRFGRKNGNIKLSKTDFIYESPTGLFKSIKHID

SEQ ID NO: 519 - protein, 1372 aa, Legionella pneumophila
MESSQILSPIGIDLGGKFTGVCLSHLEAFAELPNHANTKYSVILIDHNNFQLSQAQRRATRHRVRNKKRNQFVKRVALQLFQHILSRDLNAKEETALCHYLNNRGYTYVDTDLDEYIKDETTINLLKELLPSESEHNFIDWFLQKMQSSEFRKILVSKVEEKKDDKELKNAVKNIKNFITGFEKNSVEGHRHRKVYFENIKSDITKDNQLDSIKKKIPSVCLSNLLGHLSNLQWKNLHRYLAKNPKQFDEQTFGNEFLRMLKNFRHLKGSQESLAVRNLIQQLEQSQDYISILEKTPPEITIPPYEARTNTGMEKDQSLLLNPEKLNNLYPNWRNLIPGIIDAHPFLEKDLEHTKLRDRKRIISPSKQDEKRDSYILQRYLDLNKKIDKFKIKKQLSFLGQGKQLPANLIETQKEMETHFNSSLVSVLIQIASAYNKEREDAAQGIWFDNAFSLCELSNINPPRKQKILPLLVGAILSEDFINNKDKWAKFKNFWNTHKIGRTSLKSKCKEIEEARKNSGNAFKIDYEEALNHPEHSNNKALIKIIQTIPDIIQAIQSHLGHNDSQALIYHNPFSLSQLYTILETKRDGFHKNCVAVTCENYWRSQKTEIDPEISYASRLPADSVRPFDGVLARMMQRLAYEIAMAKWEQIKHIPDNSSLLIPIYLEQNRFEFEESFKKIKGGSSDKTLEQAIEKQNIQWEEKFQRIINASMNICPYKGASIGGQGEIDHIYPRSLSKKHFGVIFNSEANLIYCSSQGNREKKEEHYLLEHLSPLYLKHQFGTDNVSDIKNFISQNVANIKKYISFHLLTPEQQKAARHALFLDYDDEAFKTITKFLMSQQKARVNGTQKFLGKQIMEFLSTLADSKQLQLEFSIKQITAEEVHDHRELLSKQEPKLVKSRQQSFPSHAIDATLTMSIGLKEFPQFSQELDNSWFINHLMPDEVHLNPVRSKEKYNKPNISSTPLFKDSLYAERFIPVWVKGETFAIGFSEKDLFEIKPSNKEKLFTLLKTYSTKNPGESLQELQAKSKAKWLYFPINKTLALEFLHHYFHKEIVTPDDTTVCHFINSLRYYTKKESITVKILKEPMPVLSVKFESSKKNVLGSFKHTIALPATKDWERLFNHPNFLALKANPAPNPKEFNEFIRKYFLSDNNPNSDIPNNGHNIKPQKHKAVRKVFSLPVIPGNAGTMMRIRRKDNKGQPLYQLQTIDDTPSMGIQINEDRLVKQEVLMDAYKTRNLSTIDGINNSEGQAYATFDNWLTLPVSTFKPEIIKLEMKPHSKTRRYIRITQSLADFIKTIDEALMIKPSDSIDDPLNMPNEIVCKNKLFGNELKPRDGKMKIVSTGKIVTYEFESDSTPQWIQTLYVTQLKKQP

SEQ ID NO: 520 - protein, 907 aa, Leptospira inadai
MAKSIEEIRSIQNEFVVEYSILLKKIKKGEIDKKNDVYKVYQNTIKSSERLEQVLKERLGFQNVSKSYFNNPYSIAQLYNLISVDRSGFSKVCRSCQEENHWRSTLIDTDRGPQAQASKQVSDTGRPFDGQLAMLLDRIAFEIVKLKRIEIERLLSNKNSSKIEVVEIPLLIEENSFNFRYELAELKKLSKKKKDQLKKSVEEFDTKLNSKQERIKAASRELCPYTGKKISKGEIDHILPRSWTQKQFGTALNAEANLIYASREGNQSKGNREYGLNDLDEKYLNIIFGTKEVDSIQRNISDTIDRLDIERGTTRIVFDRLAPNERDCLRHALFIKSLRPKVFELLSGQLKARVNGTQLYLAKRIRSLLLKNQDFITKSLIIKVPSFSFYEPRTVDLPYMRKELAEKFPNLGKQNPQPTGSHIIDAAMVMAYAVETDSGNLSFGSKDKSEGFDSESLSRFLPSNIQFLSIKSKDKTDSKYPYKKPLFKDGVFGERFLPILIAEKGLRVGYTLENSLEVNSENPEEFFNVLKPYLLFKRKPIESNYQTLVAFAQKDKRGYIVLPVNKPKALESISQRKSDPHTSILKNILYTVSRESIPSLIFDKNTLIPEIKSNKVNWGDKLEKKFRIKIEIKLYGKKIADGFIRYPGKTEWEKLLLTEPLKGLVKNKTLTPKWFDSLENLAGLDDHFKDTSNPEAKHKRKSNHYALPVPKGPSGGFRIRRNSFDGYKVYQLYSVDGNSFHAFKIENGWTGKTLLLDIYQNSGNLHSLDYDYENTDISQTALFSKFYKIEFSKEETQKINSKGIKSLYVAPGSSSRQYIRVIFDKQTFSKFIKFQSKFWEFDLITPLPKDKAKDLIESILKIFPEDLRPKKPRNDIHIQNISHDSVQVEYIADGKTQGFGQYFINQN

SEQ ID NO: 521 - protein, 418 aa, Leptospira inadai
MILKSPIAIDLGAKNTGIVYTTYQPNALPTEIHGATIISDNLKLSQVDRRAKRHQRRNYTRMKLARRLVYLIIRYHYRIPEQDLTPEVKTSLQSLLTRRGYTFQSIETEGNELGQAPWGEIEDYFPNVQDYEKSLPIQTVLYHFFSSENLELNKLVPSKEPETKEDKNILKYIREQKEAFESEQNNGARHRLKYFEEIKEDFPRKIKLMECLQKNKIEEKKFLNLIQNISNLQIKPLRAYFNDKDMKEKEIWEPRRLHTYIARWIRSWHIDPKNSSKRLIRQKLLSQLENGKLKIIRDTSIYSPSKDIISFLEEIDPKDTIPPYEDQNNRHPPRCQNLWLDGKILDRYFPGWEQSLWKLIRNEKNNPFEQLITKDFRTDDTISEGKSLSEQIQIYERSHSNIKLDVRAVILQRFLDRS

SEQ ID NO: 522 - protein, 125 aa, Leptospira inadai
MSAYDRSANLDPWSLRLQGKAKKEIKTTESLSKTDLQKASDAYEKIKEILSESDTDQFIKLANRYYLEVADIKKGMWLPTAPERKHKEIPKSIAHEENQDISLFHKCNTKTGSKKRISQVSLEMF

SEQ ID NO: 523 - protein, 1355 aa, Leuconostoc gelidum
MTYSIGLDIGTGSVGWAVIGDDYRLKRAKGKNLIGVRLFDSATTAAERRGYRTTRRRLSRRHWRLRLLNDIFASDLAEQDENFLPRLKYSWVNPDDEQNPQLNSDVANGALFGSSETDKAFHKNYPTIYHLRHELMTDTAKHDLREVYLAIHHIVKYRGNFLNTADKINAENSFNVDLFIAALDEYNEFLETPITSIKDAQLFSDKLTDINARNKSVRVENAMSETYDDKSKIFKAILTALVGNTANFQTIFDLSDLEKDEAKNFKFKLDLEDVETKLDVVRAKLSDEQNAFLEAVLIAYDGITLKMILGDYKSISQSMIESYKSHQRDWKYIKNNVRLNEQKIEPDKNSVKFFKLDPKKLIYPSNLAYLQVISSNEDEHRKGLDYFKTAIQDADILQRIENDTFLPRQRTKRNGVLPYQLHLAELEQIIKKQSKYYPFLANIYTQDNKTENKLIGLLKFRVPYYVGPLVEAEKVTGDGKNHWLIKKELQENTPITPFNFDDVVDKDKSGEQFIKRITGTDSYLIGEPTLPENSLLYQKYNVLQELNNVRNERHQRLPIKVKQDIFEHVFKIDKNVNAKKVMAYLKLNGYGDFQIAGLSDTRTGKFNSNLSSYNYFVDLLGREKTEKIREDRLEEIIEIQTVFEDKILVAKRLSNLDFLTPQEKSKLSAKHYTGWGRLSQKLLTTQFIKTALSEAGDIIPQSHSIIDLLYYTDKNLMEILNDKTFNVRNWLTEQNKGTESGNSLYDQIDALAGPKDIKRGITQVFSIIDDIKKAMGSNPETVYLEFARETQTSRLTNSRLNRVQEIYNSPELKTEFAYLAKKLEAETKESIHDDRLYLYYLQEGRDMYTGKEIPFDQISSNYDIDHIIPQAFTKDDSLDNRVLVNRATNARKSNSPTFTNDIIDNRKSWWQSLVKRGLMSKEKFERLTDKRKTFSENQTNHFIARQLVETRQIIKNVADLIKNNYDGTQAVAIRASLTGEMRRYLDWPKNRDMNDYHHAHDALMMATVGKYVDRRGFFDNGSVSDGAGNAYNLYTKDWLVAARVGTRNDSQRVNPYGFIVGSMNSKAVRQQVNKETGEIVWGNENLDYLRHVLSYKKILVTRRLSGSSGRLYAETLFSPNPKAKLIAQKANRSVALYGGFTKAESAYTALVEFNKKGDRSYKLIKVPMAIANRVNDKQITVTAYIASLNLRDFSRVVLEHLPLGTLIRESDGSEFYAASSEYKHNAKELWAPKEILRSSKKLDKATADNLIDIFDFLTNDKTISNFKFYEKDLLHLKNVRDKFVEASDEIKIKVLSDVIYELHNDAGWRDPFKHIQEKPAWTMLQVKGGIKLSEKAAIVYQSPTGLFETITIVGE

SEQ ID NO: 524 - protein, 883 aa, Leuconostoc pseudomesenteroides
MIGVRLFEGADTAAERRGYRTTRRRLSRRRWRLRLLNDIFASELSKIDENFLPRLKYSWVNKNDTDNVHFGVGVFDNSEQEKAFYQDYPTIYHLRQKLMTDNRQHDLREVYLAIHHIVKYRGHFLNSGEISANSSFDAQKFLELLREFDNTFYPDAVKFLNLDQLDLPDKISSEISDSKISKSERVDRVLQHVQLANSGAKKILKAILNAVVGNSVDSVAMFSLSDLDKEEKKKINHPVTDSKPFKYSDKEVEAKLDELSNLLQDEQKIEFLSLLKLSFDGLTLKMLLGNAKSVSEAMVERYKVHKDDLKFIKENILNSFSKDKKKEFDKYYEAHLAEKDVDNVDKYFKKIIDDSIISKDKKIELLQKIDDHDFLPSQRSKINGAIPHQLHRNELDKIISQQSKYYPFLADSYTQNGKTETKLAGLVNFRVPYYVGPLVSKENADRNNPDGGQNHWVEFKENTSLSNLTPWNFNEIVDKDKSAAKFIERLTGMDTYLIGEPTLPQNSLLYQKYNVLQELNNIRVDNHKLDVKIKQDVFEHLFKTQNSVSAKDVKNYLIANGYAAPSIQITGLSDTNEKTFNSKLSSYNYLVDKLGRTFVESVKSDVLEKIIELQTVFEDKTVLLRQLSMISELTLAQANQLAEKHWTGWGRLSRKLLSSKVVDVNKITNSTFYPATSRQTIIDTLYHTQLNLMEIINNAEDLYGVRQWISEQNKSDSSDTNDVYDQIQELAGDKKIKRGITQSFRILDDIVKAMGGEPERVYLEFARENQQSGVSFSRKNLLSKLYENDSLKQTFKELKSQLESETKENLQNDRLYLYYLQQGRDMYSNDELNIDQLSSYDIDHIIPQAYTKDNSFDNRVLVSSKANRLKRMLLWYPVKLSKK

SEQ ID NO: 525 - protein, 468 aa, Leuconostoc pseudomesenteroides
MKDQGFISKRKFENLTRRGDFSEQQKERFIARALVETRQIIVNVSSLIDSHFNHTKAVAVKSNMTTDMRHYTKVPKNRDINDYHHAHDALFVATVGQYIENKGFMKAGKLSDSVGNEYNRYTKKWIETARKNTNYGRVNPFGFVVGSMQTATRGKLDYETGELKVVKNNYWSKDDLDYLLKVVSYKKILVTTKLQDNKGAMYDANLISAKGSGKKKAQLQISKSKNIDLYGGFNKLQNEYSVLILNHDEYRWLSIPMYARNSSEQYLHDKYPDAKVILNHILVGQPILLSNSSDPQKSKFASLRIATGGDYHNNFEFVPSVDVKKILDNIYLNHSVTDDEYKKVFESLLATLHDKFVFGIHQVMYNKIFDNKYLFDKMPDEAKRNVINSLLKFMNISKNQLGAVGKIGGKVNGVLYGFKTETEKGTSAGQLISNGKMQPHDIFIFQSPTGIFERRVTVAELANVIKDE

SEQ ID NO: 526 - protein, 1103 aa, Listeria innocua
LKLYPGEKSTGMFAQFISLIVGSKGNFQKPFDLIEKSDIECAKDSYEEDLESLLALIGDEYAELFVAAKNAYSAVVLSSIITVAETETNAKLSASMIERFDTHEEDLGELKAFIKLHLPKHYEEIFSNTEKHGYAGYIDGKTKQADFYKYMKTTLENIEGADYFIAKIEKENFLRKQRTFDNGAIPHQLHLEELEAILHQQAKYYPFLKENYDKIKSLVTFRIPYFVGPLANGQSEFAWLTRKADGEIRPWNIEEKVDFGKSAVDFIEKMTNKDTYLPKENVLPKHSLCYQKYLVYNELTKVRYINDQGKTSYFSGQEKEQIFNDLFKQKRKVKKKDLELFLRNMSHVESPTIEGLEDSFNSSYSTYHDLLKVGIKQEILDNPVNTEMLENIVKILTVFEDKRMIKEQLQQFSDVLDGVVLKKLERRHYTGWGRLSAKLLMGIRDKQSHLTILDYLMNDDGLNRNLMQLINDSNLSFKSIIEKEQVTTADKDIQSIVADLAGSPAIKKGILQSLKIVDELVSVMGYPPQTIVVEMARENQTTGKGKNNSRPRYKSLEKAIKEFGSQILKEHPTDNQELKNNRLYLYYLQNGKDMYTGQDLDIHNLSNYDIDHIVPQSFITDNSIDNLVLTSSAGNREKGNDVPPLEIVQKRKVFWEKLYQGNLMSKRKFDYLTKAERGGLTEADKARFIHRQLVETRQITKNVANILHQRFNYGKDDHGNTMKQVRIVTLKSALVSQFRKQFQLYKVRGVNDYHHAHDAYLNGVVANTLLKVYPQLEPEFVYGDYHQFDWFKANKATAKKQFYTNIMLFFAQKDRIIDENGEILWDKKYLDTVKKVMSYRQMNIVKKTEIQKGEFSKATIKPKGNSSKLIPRKTNWDPMKYGGLDSPNMAYAVVIEYAKGKNKLVFEKKIIRVTIMERKAFEKDEKAFLEEQGYRQPKVLAKLPKYTLYECEEGRRRMLASANEAQKGNQQVLPNHLVTLLHHAANCEVSDGKSLDYIESNREMFAELLAHVSEFAKRYTLAEANLNKINQLFEQNKEGDIKAIAQSFVDLMAFNAMGAPASFKFFETTIERKRYNNLKELLNSTIIYQSITGLYESRKRLDD

SEQ ID NO: 527 - protein, 1337 aa, Listeria innocua
MKNMKKPYTIGLDIGTNSVGWAVLTDQYDLVKRKMKIAGDSEKKQIKKNFWGVRLFDEGQTAADRRMARTARRRIERRRNRISYLQGIFAEEMSKTDANFFCRLSDSFYVDNEKRNSRHPFFATIEEEVEYHKNYPTIYHLREELVNSSEKADLRLVYLALAHIIKYRGNFLIEGALDTQNTSVDGIYKQFIQTYNQVFASGIEDGSLKKLEDNKDVAKILVEKVTRKEKLERILKLYPGEKSAGMFAQFISLIVGSKGNFQKPFDLIEKSDIECAKDSYEEDLESLLALIGDEYAELFVAAKNAYSAVVLSSIITVAETETNAKLSASMIERFDTHEEDLGELKAFIKLHLPKHYEEIFSNTEKHGYAGYIDGKTKQADFYKYMKMTLENIEGADYFIAKIEKENFLRKQRTFDNGAIPHQLHLEELEAILHQQAKYYPFLKENYDKIKSLVTFRIPYFVGPLANGQSEFAWLTRKADGEIRPWNIEEKVDFGKSAVDFIEKMTNKDTYLPKENVLPKHSLCYQKYLVYNELTKVRYINDQGKTSYFSGQEKEQIFNDLFKQKRKVKKKDLELFLRNMSHVESPTIEGLEDSFNSSYSTYHDLLKVGIKQEILDNPVNTEMLENIVKILTVFEDKRMIKEQLQQFSDVLDGVVLKKLERRHYTGWGRLSAKLLMGIRDKQSHLTILDYLMNDDGLNRNLMQLINDSNLSFKSIIEKEQVTTADKDIQSIVADLAGSPAIKKGILQSLKIVDELVSVMGYPPQTIVVEMARENQTTGKGKNNSRPRYKSLEKAIKEFGSQILKEHPTDNQELRNNRLYLYYLQNGKDMYTGQDLDIHNLSNYDIDHIVPQSFITDNSIDNLVLTSSAGNREKGDDVPPLEIVRKRKVFWEKLYQGNLMSKRKFDYLTKAERGGLTEADKARFIHRQLVETRQITKNVANILHQRFNYEKDDHGNTMKQVRIVTLKSALVSQFRKQFQLYKVRDVNDYHHAHDAYLNGVVANTLLKVYPQLEPEFVYGDYHQFDWFKANKATAKKQFYTNIMLFFAQKDRIIDENGEILWDKKYLDTVKKVMSYRQMNIVKKTEIQKGEFSKATIKPKGNSSKLISRKTNWDPMKYGGLDSPNMAYAVVIEYAKGKNKLVFEKKIIRVTIMERKAFEKDEKAFLEEQGYRQPKVLAKLPKYTLYECEEGRRRMLASANEAQKGNQQVLPNHLVTLLHHVANCEVSDGKSLDYIESNREMFAELLAHVSEFAKRYTLAEANLNKINQLFEQNKEGDIKAIAQSFVDLMAFNAMGAPASFKFFETTIERKRYNNLKELLNSTIIYQSITGLYESRKRLDD

SEQ ID NO: 528 - protein, 953 aa, Listeria ivanovii
MKKMLANIDGADYFIDQIEEENFLRKQRTFDNGTIPHQLHLEELEAILHQQAKYYPFLRKDYEKIRSLVTFRIPYFIGPLANGQSDFAWLTRKADGEIRPWNIEEKVDFGKSAIDFIEKMTNKDTYLPKENVLPKHSLCYQKYMVYNELTKIRYIDDQGKTHHFSGQEKQQIFNGLFKQQRKVKKKDLERFLYTINHIESPTIEGVEDAFNSSFATYHDLQKGGVTQEILDNPLNADMLEEIVKILTVFEDKRMIKEQLQSFSDVLDGTILKKLERRHYTGWGRLSAKLLTGIRDKHSHLTILDYLMNDDGLNRNLMQLINDSNLSFKSIIEKEQVSTADKGIQSIVAELAGSPAIKKGILQSLKIVDELVGIMGYPPQTIVVEMARENQTTGKGKNNSKPRFISLEKAIKEFGSQILKEHPTDNQCLKNDRLYLYYLQNGKDMYTGKELDIHNLSNYDIDHIIPQSFITDNSIDNRVLVSSTANREKGDNVPLLEVVRKRKAFWEKLYQAKLMSKRKFDYLTKAERGGLTEADKANFIQRQLVETRQITKNVANILYQRFNCKQDENGNEVEQVRIVTLKSTLVSQFRKQFQLYKVREVNDYHHAHDAYLNGVVANTLLKVYPQLEPEFVYGDYHQFDWFKANKATAKKQFYTNIMRFFAKENQIIDKNGEILWDNRYLDTIKKVLSYRQMNIVKKTEIQKGEFSNATVNPKGNSSKLISRKADWNPIKYGGFDGSNMAYSIVIEYEKRKKKTVIKKELIQINIMERVAFEKDQKAFLEEKGYYSPKVLTKIPKYTLYECENGRRRMLGSANEAQKGNQMVLPNHLMTLLYHAKNCEANDGESLAYIEMHREMFAELLAYISEFAKRYTLANDRLEKINMFFEQNKKGDIKVIAKSFDKLKVFNAFGAPRDFEFFETTIKRKRYYNIKELLNATIIYQSITGLYEARKRLED

SEQ ID NO: 529 - protein, 232 aa, Listeria ivanovii
MMSKLILGLDIGISSVGWGVLDESTNEVVDAGVRLFEEATRNGNEDRRGFRSARRLKRRRQHRLERAKGLIENNGFSCTDINKFNPYQARYNAIFGEVTKDELAAALFHLVKRRGTTIDAPEEEVKDVENELSTKMQLEKNAKKLATKYDYICEIQLEKLKENKVVRDHENRFRTEDYVKEARAILENQQEYYPEVTNEFIESYMALIETRRMYYDGPGSEKSPTPYGQYFI

SEQ ID NO: 530 - protein, 300 aa, Listeria monocytogenes
DDGLNRNLMQLINDSNLSFKSIIEKEQVSTTDKDLQSIVADLAGSPAIKKGILQSLKIVDELVSIMGYPPQTIVVEMARENQTTVKGKNNSRPRYKSLEKAIKEFGSQILKEHPTDNQELRNNRLYLYYLQNGKDMYTGQELDIHNLSNYDIDHIVPQSFITDNSIDNLVLTSSAGNREKGDDVPPLEIVRKRKVFWEKLFQGNLMSKRKFDYLTKAERGGLTEADKATFIHRQLVETRQITKNVANILHQRFNNETDNHGNNMEQVRIVMLKSALVSQFRKQFQLYKVREVNDYHHAHD

SEQ ID NO: 531 - protein, 782 aa, Listeria monocytogenes
  misc_feature (722)..(722): Xaa can be any naturally occurring amino acid
IFNDLFKQKRKVKKKDLELFLRNINQIESPTIEGLEDSFNASYATYHDLLKVGMKQEILDNPLNTEMLEDIVKILTVFEDKRMIKEQLQQFSDVLDGVVLKKLERRHYTGWGRLSAKLLVGIRDKQSHLTILEYLMNDDGLNRNLMQLINDSNLSFKSIIEKEQVSTTDKDLQSIVADLAGSPAIKKGILQSLKIVDELVSIMGYPPQTIVVEMARENQTTVKGKNNSRPRYKSLEKAIKEFGSQILKEHPTDNQELKNNRLYLYYLQNGKDIYTGQELDIHNLSNYDIDHIVPQSFITDNSIDNLVLTSSAGNREKGDDVPPLEIVRKRKVFWEKLYQGNLMSKRKFDYLTKAERGGLTEADKARFIHRQLVETRQITKNVANILHQRFNNETDNHGNTMEQVRIVTLKSALVSQFRKQFQLYKVREVNDYHHAHDAYLNGVVANTLLKVYPQLEPEFVYGEYHQFDWFKANKATAKKQFYTNIMLFFAQKERIIDENGEILWDKKYLETIKKVLDYRQMNIVKKTEIQKGEFSKATIKPKGNSSKLIPRKENWDPMKYGGLDSPNMAYAVIIEHAKGKKKIVIEKKLIQINIMERKMFEKDEEAFLEEKGYRHPKVLTKLPKYTLYECEKGRRRMLASANEAQKGNQLVLSNHLVSLLYHAKNCEASDGKSLKYTEAHRETFSELLAQVSEFATRYTLADANLSKINNLFEQNKEGDIKXIAQSFVDLMVFNAMGAPASFKFFEATIDRKRYTNLKELLSSTIIYQSITGLYESRKRLDD

SEQ ID NO: 532 - protein, 1334 aa, Listeria monocytogenes; identical to SEQ ID NO: 114

SEQ ID NO: 533 - protein, 1334 aa, Listeria monocytogenes
MKNPYTIGLDIGTNSVGWAVLTDQYDLVKRKMKVAGNSDKKQIKKNFWGVRLFDDGQTAVDRRMNRTARRRIERRRNRISYLQEIFAVEMANIDANFFCRLNDSFYVDSEKRNSRHPFFATIEEEVAYHKNYRTIYHLREELVNSSEKADLRLVYLALAHIIKYRGNFLIEGALDTKNTSVDEVYKQFIQTYNQVFMSNIEEGALAKVEENTEVASILAGKFTRREKFERILRLYPGEKSTGMFAQFISLIVGNKGNFQKVFNLVEKTDIECAKDSYEEDLEALLAIIGDEYAELFVAAKNTYNAVVLSSIITVTATETNAKLSASMIERFDAHEKELGELKAFIKLHLPKQYQEIFNNAEIDGYAGYIDGKTKQVDFYKYLKTTLENVEGADYFITKIEEENFLRKQRTFDNGVIPHQLHLEELEAILHQQAKYYPFLREGYDKIKSLVTFRIPYFVGPLANGQSEFAWLTRKDDGEIRPWNIEEKVDFGKSAVDFIEKMTNKDTYLPKENVLPKHSLCYQKYMVYNELTKIRYIDDQGKTNYFSGREKQQIFNDLFKQKRKVKKKDLELFLRNINHIESPTIEGLEDSFNASYATYHDLLKVGLKQEILDNPLNTEILEDIVKILTVFEDKRMIKEQLEQFSDVLDGVVLKKLERRHYTGWGRLSAKLLVGIRDKQSHLTILDYLMNDDGLNRNLMQLINDSNLSFKSIIEKEQVSTTDKDLQSIVADLAGSPAIKKGILQSLKIVDELVSIMGYPPQTIVVEMARENQTTGKGKNNSKPRYKSLEKAIKDFGSQILKEHPTDNQELKNNRLYLYYLQNGKDIYTGQELDIHNLSNYDIDHIVPQSFITDNSIDNLVLTSSAGNREKGGDVPPLEIVRKRKVFWEKLYQGNLMSKRKFDYLTKAERGGLTEADKARFIHRQLVETRQITKNVANILHQRFNKETDNHGNTMEQVRIVTLKSALVSQFRKQFQLYKVREVNDYHHAHDAYLNGVVANTLLKVYPQLEPEFVYGEYHQFDWFKANKATAKKQFYTNIMLFFAQKERIIDENGEILWDKKYLETIKKVLDYRQINIVKKTEIQKGEFSKATIKPKGNSSKLIPRKENWDPMKYGGLDSPNMAYAVIIEHAKGKKKIVIEKKLIQINIMERKMFEKDEEAFLEEKGYHQPKVLTKLPKYTLYECEKGRRRMLSSANEAQKGNQLVLSNHLVSLLYHAKNCEASDGKSLKYIEAHRETFSELLAQVSEFATKYTLADANLSKINNLFEQNKEGDIKAIAQSFVDLMAFNAMGAPASFKFFEATIDRKRYTNLKELLSSTIIYQSITGLYESRKRLDD

SEQ ID NO: 534 - protein, 1334 aa, Listeria monocytogenes
MKNPYTIGLDIGTNSVGWAVLTDQYDLVKRKMKVAGNSDKKQIKKNFWGVRLFDDGQTAVDRRMNRTARRRIERRRNRISYLQEIFAVEMANIDANFFCRLNDSFYVDSEKRNSRHPFFATIEEEVAYHKNYRTIYHLREELVNSSEKADLRLVYLALAHIIKYRGNFLIEGALDTKNTSVDEVYKQFIQTYNQVFMSNIEEGALAKVEENTEVASILAGKFTRREKFERILRLYPGEKSTGMFAQFISLIVGNKGNFQKVFNLVEKTDIECAKDSYEEDLEALLAIIGDEYAELFVAAKNTYNAVVLSSIITVTATETNAKLSASMIERFDAHEKELGELKAFIKLHLPKQYQEIFNNAEIDGYAGYIDGKTKQVDFYKYLKTTLENVEGADYFITKIEEENFLRKQRTFDNGVIPHQLHLEELEAILHQQAKYYPFLREGYDKIKSLVTFRIPYFVGPLANGQSEFAWLTRKDDGEIRPWNIEEKVDFGKSAVDFIEKMTNKDTYLPKENVLPKHSLCYQKYMVYNELTKIRYIDDQGKTNYFSGREKQQIFNDLFKQKRKVKKKDLELFLRNINHIESPTIEGLEDSFNASYATYHDLLKVGLKQEILDNPLNTEILEDIVKILTVFEDKRMIKEQLEQFSDVLDGVVLKKLERRHYTGWGRLSAKLLVGIRDKQSHLTILDYLMNDDGLNRNLMQLINDSNLSFKSIIEKEQVSTTDKDLQSIVADLAGSPAIKKGILQSLKIVDELVSIMGYPPQTIVVEMARENQTTGKGKNNSKPRYKSLEKAIKDFGSQILKEHPTDNQELKNNRLYLYYLQNGKDIYTGQELDIHNLSNYDIDHIVPQSFITDNSIDNLVLTSSAGNREKGGDVPPLEIVRKRKVFWEKLYQGNLMSKRKFDYLTKAERGGLTEADKARFIHRQLVETRQITKNVANILHQRFNKETDNHGNTMEQVRIVTLKSALVSQFRKQFQLYKVREVNDYHHAHDAYLNGVVANTLLKVYPQLEPEFVYGEYHQFDWFKANKATAKKQFYTNIMLFFAQKERIIDENGEILWDKKYLETIKKVLDYRQINIVKKTEIQKGEFSKATIKPKGNSSKLIPRKENWDPVKYGGLDSPNMAYAVIIEHAKGKKKIVIEKKLIQINIMERKMFEKDEEAFLEEKGYHQPKVLTKLPKYTLYECEKGRRRMLSSANEAQKGNQLVLSNHLVSLLYHAKNCEASDGKSLKYIEAHRETFSELLAQVSEFATKYTLADANLSKINNLFEQNKEGDIKAIAQSFVDLMAFNAMGAPASFKFFEATIDRKRYTNLKELLSSTIIYQSITGLYESRKRLDD

SEQ ID NO: 535 - protein, 1099 aa, Listeria monocytogenes
MKNPYTIGLDIGTNSVGWAVLTDQYDLVKRKMKVAGNSDKKQIKKNFWGVRLFDDGQTAVDRRMNRTARRRIERRRNRISYLQEIFAVEMANIDANFFCRLNDSFYVDSEKRNSRHPFFATIEEEVAYHKNYRTIYHLREELVNSSEKADLRLVYLALAHIIKYRGNFLIEGALDTKNTSVDEVYKQFIQTYNQVFMSNIEEGALAKVEENTEVASILAGKFTRREKFERILRLYPGEKSTGMFAQFISLIVGNKGNFQKVFNLVEKTDIECAKDSYEEDLEALLAIIGDEYAELFVAAKNTYNAVVLSSIITVTATETNAKLSASMIERFDAHEKELGELKAFIKLHLPKQYQEIFNNAEIDGYAGYIDGKTKQVDFYKYLKTTLENVEGADYFITKIEEENFLRKQRTFDNGVIPHQLHLEELEAILHQQAKYYPFLREGYDKIKSLVTFRIPYFVGPLANGQSEFAWLTRKDDGEIRPWNIEEKVDFGKSAVDFIEKMTNKDTYLPKENVLPKHSLCYQKYMVYNELTKIRYIDDQGKTNYFSGREKQQIFNDLFKQKRKVKKKDLELFLRNINHIESPTIEGLEDSFNASYATYHDLLKVGLKQEILDNPLNTEILEDIVKILTVFEDKRMIKEQLEQFSDVLDGVVLKKLERRHYTGWGRLSAKLLVGIRDKQSHLTILDYLMNDDGLNRNLMQLINDSNLSFKSIIEKEQVSTTDKDLQSIVADLAGSPAIKKGILQSLKIVDELVSIMGYPPQTIVVEMARENQTTGKGKNNSKPRYKSLEKAIKDFGSQILKEHPTDNQELKNNRLYLYYLQNGKDIYTGQELDIHNLSNYDIDHIVPQSFITDNSIDNLVLTSSAGNREKGGDVPPLEIVRKRKVFWEKLYQGNLMSKRKFDYLTKAERGGLTEADKARFIHRQLVETRQITKNVANILHQRFNKETDNHGNTMEQVRIVTLKSALVSQFRKQFQLYKVREVNDYHHAHDAYLNGVVANTLLKVYPQLEPEFVYGEYHQFDWFKANKATAKKQFYTNIMLFFAQKERIIDENGEILWDKKYLETIKKVLDYRQINIVKKTEIQKGEFSKATIKPKGIPAN

SEQ ID NO: 536 - protein, 1334 aa, Listeria monocytogenes
MKNPYTIGLDIGTNSVGWAVLTDQYDLVKRKMKVAGNSDKKQIKKNFWGVRLFDEGETAADRRMNRTARRRIERRRNRISYLQEIFALEMANIDANFFCRLNDSFYVDSEKRNSRHPFFATIEEEVAYHKNYRTIYHLREELVNSSEKADLRLVYLALAHIIKYRGNFLIEGALDTKNTSVDGVYKQFIQTYNQVFISNIEEGTLAKMEENTTVADILAGKFTRKEKLERILQLYPGEKSTGMFAQFISLIVGSKGNFQKVFDLVEKTDIECAKDSYEEDLEALLAIIGDEYAELFVAAKNTYNAVVLSSIITVTDTETNAKLSASMIERFDAHEKDLSELKAFIKLHLPKQYEEIFSNVAIDGYAGYIDGKTKQVDFYKYLKTLLENIEGADYFIAKIEEENFLRKQRTFDNGAIPHQLHLEELEAILHQQAKYYPFLKEAYDKIKSLVTFRIPYFVGPLANGQSDFAWLTRKADGEIRPWNIEEKVDFGKSAVDFIEKMTNKDTYLPKENVLPKHSLYYQKYMVYNELTKVRYIDDQGKTNYFSGQEKQQIFNDYFKQKRKVSKKDLEQFLRNMSHIESPTIEGLEDSFNSSYATYHDLLKVGIKQEVLENPLNTEMLEDIVKILTVFEDKRMIKEQLQQFSDVLDGAVLKKLERRHYTGWGRLSAKLLVGIRDKQSHLTILDYLMNDDGLNRNLMQLINDSNLSFKSIIEKEQVSTTDKDLQSIVADLAGSPAIKKGILQSLKIVDELVSIMGYPPQTIVVEMARENQTTVKGKNNSRPRYKSLEKAIKEFGSQILKEHPTDNQELRNNRLYLYYLQNGKDMYTGQELDIHNLSNYDIDHIVPQSFITDNSIDNLVLTSSAGNREKGDDVPPLEIVRKRKVFWEKLFQGNLMSKRKFDYLTKAERGGLTEADKATFIHRQLVETRQITKNVANILHQRFNNETDNHGNNMEQVRIVMLKSALVSQFRKQFQLYKVREVNDYHHAHDAYLNGVVANTLLKVYPQLEPEFVYGEYHQFDWFKANKATAKKQFYTNIMLFFAQKERIIDENGEILWDKKYLETIKKVLDYRQMNIVKKTEIQKGEFSKATIKPKGNSSKLIPRKENWDPMKYGGLDSPNMAYAVIIEHAKGKKKVVFEKKIIRITIMERKAFEKDEKSFLEKQGYRQPKVLTKLPKYTLYECENGRRRMLASANEAQKGNQQVLKGQLITLLHHAKNCEASDGKSLDYIESNREMFGELLAHVSEFAKRYTLADANLSKINQLFEQNKDNDIKVIAQSFVNLMAFNAMGAPASFKFFEATIERKRYTNLKELLSATIIYQSITGLYEARKRLDG

SEQ ID NO: 537 - protein, 1334 aa, Listeria monocytogenes
MKNPYTIGLDIGTNSVGWAVLTNQYDLVKRKMKVAGNSDKKQIKKNFWGVRLFDDGQTAVDRRMNRTARRRIERRRNRISYLQEIFAVEMANIDANFFCRLNDSFYVDSEKRNSRHPFFATIEEEVAYHKNYRTIYHLREELVNSSEKADLRLVYLALAHIIKYRGNFLIEGALDTKNTSVDGVYEQFIQTYNQVFMSNIEEGTLAKVEENIEVANILAGKFTRREKFERILQLYPGEKSTGMFAQFISLIVGSKGNFQKVFDLIEKTDIECAKDSYEEDLEALLAIIGDEYAELFVAAKNTYNAVVLSSIITVTATETNAKLSASMIERFDAHEKDLGELKAFIKLHLPKQYQEIFNNAAIDGYAGYIDGKTKQVDFYKYLKTILENIEGADYFIAKIEEENFLRKQRTFDNGAIPHQLHLEELEAIIHQQAKYYPFLREDYEKIKSLVTFRIPYFVGPLAKGQSEFAWLTRKADGEIRPWNIEEKVDFGKSAVDFIEKMTNKDTYLPKENVLPKHSLCYQKYMVYNELTKVRYIDDQGKTNYFSGQEKQQIFNDLFKQKRKVKKKDLELFLRNINHIESPTIEGLEDSFNASYATYHDLLKVGMKQEILDNPLNTEMLEDIVKILTVFEDKPMIKEQLQQFSDVLDGGVLKKLERRHYTGWGRLSAKLLVGIREKQSHLTILDYLMNDDGLNRNLMQLINDSNLSFKSIIEKEQVSTTDKDLQSIVADLAGSPAIKKGILQSLKIVDELVSIMGYPPQTIVVEMARENQTTGKGKNNSKPRYKSLEKAIKEFGSKILKEHPTDNQELKNNRLYLYYLQNGKDMYTGQELDIHNLSNYDIDHIVPQSFITDNSIDNLVLTSSAGNREKGGDVPPLEIVRKRKVFWEKLYQGNLMSKRKFDYLTKAERGGLTDADKARFIHRQLVETRQITKNVANILHQRFNNETDNHGNTMEQVRIVTLKSALVSQFRKQFQLYKVREVNDYHHAHDAYLNGVVANTLLKVYPQLEPEFVYGEYHQFDWFKANKATAKKQFYTNIMLFFGQKERIIDENGEILWDKKYLETIKKVLDYRQMNIVKKTEIQKGEFSKATIKPKGNSSKLIPRKENWDPMKYGGLDSPNMAYAVIIEHAKGKKKLIFEKKIIRITIMERKMFEKDEEAFLEEKGYRHPKVLTKLPKYTLYECEKGRRRMLASANEAQKGNQLVLSNHLVSLLYHAKNCEASDGKSLKYIEAHRETFSELLAQVSEFATRYTLADANLSKINNLFEQNKEGDIQAIAQSFVDLMAFNAMGAPASFKFFEATIDRKRYTNLKELLSSTIIYQSITGLYESRKRLDD

SEQ ID NO: 538 - protein, 874 aa, Listeria seeligeri; identical to SEQ ID NO: 180

SEQ ID NO: 539 - protein, 1087 aa, Listeriaceae bacterium
MKKLVLGLDIGVASVGWGIIDAENGDVVDTGVRLFSSRDASENESRRTSRQSRRLSRRKKHRRERIKQLLLAHDMDICDIVNENPYELRVKGLNEKLEVSEIYVALTHLAKRRGVSYLDDVVEEGGTIKSEHLNKNMEEIKSGKMPCEIQLERFEKYGQVRGMIEINQDTEESSFLVNIFRTSDYIKEAKTILATQQKFHKQITNEFIDEYIHIMASKRDYFIGPGNEKSRTDYGVYRTNGDTWDNLFEILIGKCSVFPEETRAARSSYVAQEFNLLNDLNNLKISNLESGKLSASQKHDIVEKVKNSKKFGTKDLLKYIASVCECKIEDIGGCRVDKNRKPIMHTFENYRKVHNALNEAGVDLRLSETDYDELMKIMTLNSETLEIKKQCKEKLPQLTEDYLNVCLVLNKKGAFSGWHALSLKAMKLMMPELYGTSKNQMQIIHTMQLGKAYLKPLNQQKYLNSEAILEEIYNPIAARSIRQTIKVTNAILKKYGHLDSVIIEMPRDYQTSEDERKMIEKMQKENEKEKKAALKRAREEYPFPDEAFRNHKELATKLRLWYQQDQFCVYSGRKISVVDLVRNPNQFEIDHIIPQSVSLDDSLNNKVLCFSEENQKKGQQTPFYYHKGKSGNWTYEQYKLFVEKLFDKKKISNKKRELLLFEEDINKWDVRRGFIARNLVDTRYASRVILNSYQQYFGNHEMGTKVKVVRGKFTSQLRKKWRIFKDRNESHSHHAIDALIVAATANLRLWKKNTLGVSDEGKVYDKETGEILPFEKLTESEYNEMMNKEPYLNFKTKLQNIETKVKYSYRVSKKVNRKISDATIYSTRERDGIDYIVGKIKNIYDVKTYKDQFLKRYKKNKEQFLMYQHDPQTFAILENIMATYQDAENPFLAYKKEYGVIRKYSKKGGGSPVTSLKFIDKVLGQKIDLTAKNQAALPKNKKVVLQSITPYRADVYYDEIDKRYHLIGVKYSLFSFSKQGYVINPIAYQKLLEKEQIHSEMKFCFSLYREDIIEFGEDPDSLTRYRFWSKNESGKNKIEVKPIEKPNFEKQTVLTITKKIKILNKYQTDVLGNSFKAQEEKDPRNIE

SEQ ID NO: 540 - protein, 1345 aa, Marinilabilia sp.
MKKILGLDLGTTSIGWAFIKEPEKDVVGSEIVDMGVRIVALSSDEENDFAKGNTISINADRTLKRGARRNLQRFKLRRDALLEIFKEMKLIPSNFKYAEDGPSSTFSTLKLRDKAAKEKIELDDLVKVLLQINKKRGYRSSRKAKSEEDDGSAIDSMGIAKELYENDLTPGQWVFEALQKGRKNVPDFYRSDLQEEFKKIVNYQSEFYPDVLNSSFVEDWMGKASTPTKQYFNKKGVHLAENKGKREERRLQEYNWRAVAVNSKIDLSEIALILSQINSQISNSSGYLGAISDRSKELYFKNQTVGQYLYQQIKINPHTRLKGQVFYRQDYLDEFEKIWSVQSGFHPQLNDALKKEIRDITIFFQRRLKSQKHLISNCEFEDYHKVVPKSHPIFQEFRIWQNLNNLTLIKKDNLNEKSELALEDKIALANELAFKREQSVKDALNILGLKSSEWEFNFTKIEGNRTNHAFFEAFAKIIEIEDGEPLDLGNLKADDILDQFSEAFLRIGIDPGLLQVNNDIEGPNYEKQPYIQFWHLLYSSEDDQKLKQNLIKKFGFKPDHAKILASISLQDDHASLSSRAIKKILPHLQSGLIYDKACTYAGYNHSSSFTKEENEKRELSSELDLLKKNSLRNPVVEKILNQMINVVNAILKDPNLGKPDEIRVEMARELKANAEQRKNMTSNIASATRDHEKYREILKKEFGLKRVTKNDLLRYKLWLETDGISLYTGKPIEASKLFSKEYDIEHIIPKTRLFDDSFSNKTICERQLNIDKANVTAFSFLQNKLSGDEFEQYQSRVKSLFGKLSKAKIQKLLMANDKIPEDFIARQLQETRYISKKAKEILFEITRRVSVTTGTITDKLREDWGLVEIMKELNWEKYDKLGLTYTIEGKHGERLNKIKDWSKRNDHRHHAMDALTVALTKPAYIQYLNNLNAKELNGKKSTEIFAIEQKYLKRENGKLCFIPPVENIRTEAKKHLSKVLISYKAKNKVVTINKNRTNKKAGFNEQIALTPRGQLHKETVYGKAFHYSTKFEKIGASFDVQKINAVAKKEEREALLKRLAENGDDPKKAFTGKNSLSKMPIYLDLKRNIKLPEKVKTVVLEQNYTIRKNIDPDLKLDKVIDVGVKRILENRLKEFGGNAKLALSNLDENPIWLNKEKGITIKRVKISGVSNVESLHVKKDHFGEPILDQVGNEIPVDFVSTGNNHHVAIYEDEKGNLQEEVVSFFEAVVRQNQGLPIINKNHSLGWKFLFTLKQNEYFVFPSDDFDPTDVDLMDEENYHLISPNLFRVQKFTTKDYFFRHHLETTVEDKSELKGVSFKRLGLPGLNCIKKIRINHLGKIIQVGEY

SEQ ID NO: 541 - protein, 1091 aa, Mobiluncus mulieris
MDSRKYRVGIDVGTNSVGFAAVEEDDSGSPTRFLNTMVVIHDSGVDSEQKKYAITRLASAGTARRTRRLYRTRRQRLRELDDFISNELGYPLVNLENFADPYEPWKVRADLATTKLPNDELPEAMSIALRHMARHRGWRSPYQRVEALHLHAEISKEFAALKERVVEKTGDVFSDDATPAEVLVDLMGRQKVRGADGVLSGKLRQSDNANELRKIASVQGIDDETLNRIIDRVFSSKSPKGKASERVGMDALPGQGSKPRALKAMPSFQKFRVVSVICNLRIKDSGGDARPLSMEEKEKLIDYLMSSTTDDHVTWTDVADLLHVKRSQLQGTAKEGFDGERPYTRPPVNSTWSKIKDSKIKSLVALWKTGDVDVQSAIVEALSNASVLEDSRPGADIVVAYLESLDDKELESLDKVGLPAGRASYSEDSLERLTERMLRDDCDLFEARKREFNVADDWKPPADPIYAPVGNPGVDRVLKIVNRLLMAAEREWGAPTQINIEHVRSGFSSELMQREFERENERRRAQNEEAVKAILTEKGGNSRVSKYDITRYYAVKRQHCQCLYCGTPITFSDCELDHIVPRKGVGSTNTRVNLAAACRSCNRDKSNLPFAVWAGKASNFDVSIDDAVSRVKQWQRSQNEGVREFRAFQNEVISRLLKTTEDPEIDSRSLESVAWMARELHHRVEYYFQSKGAQTQVSVYRGAVTAQARKSSGLEDKVKMIGGGGKTRLDRRHHAMDAATIALMTPGISTTLSEKNNLRDAQKFTGQSETWKDYCGRTETARKHFAVWKSNMERLTDLFNDKLENDAIPVVQPLRLRLSNSKAHDDGIGKLDSKKLGSVWSLADIDRAATPQIWTALTRCDDFDPTKGLPENANRVIRAQGVKYESEDNIPVFPSNVAAIAVRDGYAEIGSTIHHARIYRIDDGKKTFYSMIRVFAVDLLKHQAEDLFTVKLPPSAISIRTCEDSLRRALSNGTAEYLGWLVPGDEIIVDTSDKAFHTGQIGDLLRNFPVNSFRLTGFPSNSRLRLKPVLLAGEGLRDDAEDSIKKILLGQGWRPAINVLFSKGKPRIVRRNSLGIERPSSNNGLPFSWEA

SEQ ID NO: 542 - protein, 1233 aa, Mycoplasma canis
MEKKRKVTLGFDLGIASIGWAIVDSETNQVYKLGSRLFDAPDTNLERRTQRGTRRLLRRRKYRNQKFYNLVKRTEVFGLSSREAIENRFRELSIKYPNIIELKTKALSQEVCPDEIAWILHDYLKNRGYFYDEKETKEDFDQQTVESMPSYKLNEFYKKYGYFKGALSQPTESEMKDNKDLKEAFFFDFSNKEWLKEINYFFNVQKNILSETFIEEFKKIFSFTRDISKGPGSDNMPSPYGIFGEFGDNGQGGRYEHIWDKNIGKCSIFTNEQRAPKYLPSALIFNFLNELANIRLYSTDKKNIQPLWKLSSIDKLNILLNLFNLPISEKKKKLTNANINDIVKKESTKSIMLSVEDIDMIKDEWAGKEPNVYGVGLSGLNIEESAKENKFKFQDLKILNVLINLLDNVGIKFEFKDRNDIIKNLELLDNLYLFLIYQKESNNKDSSIDLFIAKNELLNIENLKLKLKEFLLGAGNEFENHNSKTHSLSKKAIDAILPKLLDNNEGWNLEAIKNYDEEIKSQIEDNSSLMAKQDKKYLNDNFLKDAILPPNVKVTFQQAILIFNKIIQKFSKDFEIDKVVIELAREMTQDQENDALKGIAKAQKSKKSLVEERLEANNIDKSVFNDKYEKLIYKIFLWISQDFKDPYTGAQISTNEIVNNKVEIDHIIPYSLCFDDSSANKVLVHKQSNQEKSNSLPYEYIKQGHSGWNWDEFTKYVKRVFVNNVDSILSKKERLKKSENLLTTSYDGYDKLGFLARNLNDTRYATILFRDQLNNYAEHHLIDNKKMFKVIAMNGAVTSFIRKNMSYDNKLRLKDRSDFSHHAYDAAIIALFSNKTKTLYNLIDPSLNGIISKRSEGYWVIEDRYTGEIKELKKEDWTSIKNNVQARKIAKEIEEYLIDLDDEVFFSRKTKRKTNRQLYNETIYGIAAKTDEDGITNYYKKEKFSILDDKDIYLRLLREREKFVINQSNPEVIDQIIEIIESYGKENNIPSRDEAINIKYTKNKINYNLYLKQYMRSLTKSLDQFSEEFINQMIANKTFVLYNPTKNTTRKIKFLRLVNDVKINDIRKNQVINKFNGKNNEPKAFYENINSLGAIVFKNSANNFKTLSINTQIAIFGDKNWDIEDFKTYNMEKIEKYKEIYGIDKTYNFHSFIFPGTILLDKQNKEFYYISSIQTVRDIIEIKFLNKIEFKDENKNPDTSKTPKRLMFGIKSIMNNYEQVDISPFGINKKIFE

SEQ ID NO: 543 - protein, 1233 aa, Mycoplasma canis
MEKKRKVTLGFDLGIASVGWAIVDSETNQVYKLGSRLFDAPDTNLERRTQRGTRRLLRRRKYRNQKFYNLVKRTEVFGLSSREAIENRFRELSIKYPNIIELKTKALSQEVCPDEIAWILHDYLKNRGYFYDEKETKEDFDQQTIESMPSYKLNEFYKKYGYFKGALSQPTESEMKDNKDLKEAFFFDFSNKEWLKEINYFFNVQKNILSETFIEEFKKIFSFTRDISKGPGSDNMPSPYGIFGEFGDNGQGGRYEHIWDKNIGKCSIFTNEQRAPKYLPSALIFNFLNELANIRLYSTDKKNIQPLWKLSSIDKLNILLNLFNLPISEKKKKLTSANINDIVKKESTKSIMLSVEDIDMIKDEWAGKEPNVYGVGLSGLNIEESAKENKFKFQDLKILNVLINLLDNVGIKFEFKDRNDIIKNLELLDNLYLFLIYQKESNNKDSSIDLFIAKNESLNIENLKLKLKEFLLGAGNEFENHNSKTHSLSKKAIDAILPKLLDNNEGWNLEAIKNYDEEIKSQIEDNSFLMAKQDKKYLNDNFLKDAILPPNVKVTFQQAILIFNKIIQKFSKDFEIDKVVIELAREMTQDQENDALKGIAKAQKSKKSLVEERLEANNIDKSVFNEKYEKLIYKIFLWISQDFKDPYTGAKISANEIVDNKVEIDHIIPYSLCFDDSSANKVLVHKQSNQEKSNSLPYEYIKQGHSGWNWDEFTKYVKRVFVNNVDSILSKKERLKKSENLLTTSYDGYDKLGFLARNLNDTRYATILFRDQLNNYAEHHLIDDKKMFKVIAMNGAVTSFIRKNMSYDNKLRLKNRNDFSHHAYDAAIIALFSNKTKTLYNLIDPSLNGIISKRSEGYWVIEDRYTGEIKELKKEDWTSIKNNVQARKIAKEIEEYLIDLDDEVFFSRKTKRKTNRQLYNETIYGIAAKTDEDGITNYYKKEKLSILDDKDIYLRLLREREKFVINQSNPEVIDQIIEIIESYGKENNIPSRDEAINIKYTKNKINYNLYLKQYMRSLTKSLDQFSEEFINQMIANKTFVLYNPTKNTTRKIKFLRLVNDVKINDIRKNQVINKFNGKNNEPKAFYENINSLGAIVFKNSANNFKTLSINTQIAIFGDKNWDIEDFKTYNMEKIEKYKEIYGIDKTYNFHSFIFPGTILLDKQNKEFYYISSIQTVRDIIEIKFLNKIEFKDENKNQDTSKTPKRLMFGIKSIMNNYEQVDISPFGINKKIFE

SEQ ID NO: 544 - protein, 1233 aa, Mycoplasma canis; identical to SEQ ID NO: 247

SEQ ID NO: 545 - protein, 1233 aa, Mycoplasma canis
MEKKRKVTLGFDLGIASVGWAIVDSETNQVYKLGSRLFDAPDTNLERRTQRGTRRLLRRRKYRNQKFYNLVKRTEVFGLSSREAIENRFRELSIKYPNIIELKTKALSQEVCPDEIAWILHDYLKNRGYFYDEKETKEDFDQQTVESMPSYKLNEFYKKYGYFKGALSQPTESEMKDNKDLKEAFFFDFSNKEWLKEINYFFNVQKNILSETFIEEFKKIFSFTRDISKGPGSDNMPSPYGIFGEFGDNGQGGRYEHIWDKNIGKCSIFTNEQRAPKYLPSALIFNFLNELANIRLYSTDKKNIQPLWKLSSVDKLNILLNLFNLPISEKKKKLTSTNINDIVKKESIKSIMISVEDIDMIKDEWAGKEPNVYGVGLSGLNIEENAKENKFKFQDLKILNVLINLLDNVGIKFEFKDRNDIIKNLELLDNLYLFLIYQKESNNKDSSIDLFIAKNKSLNIENLKLKLKEFLLGAGNEFENHNSKSHSLSKKAIDAILPKLLDNNEGWNLEAIKNYDEEIKSQIEDNSSLMAKQDKKYLNDNFLKDAILPPNVKVTFQQAILIFNKIIQKFSKDFEIDKVVIELAREMTQDQENDALKGMAKAQKSKKSLVEERLEANNIDKSVFNDKYEKLIYKIFLWISQDFKDPYTGAQISVNEIVNNKVEIDHIIPYSLCFDDSSANKVLVHKQSNQEKSNSLPYEYIKQGHSGWNWDEFTKYVKRVFVNNVDSILSKKERLKKSENLLTTSYDGYDKLGFLARNLNDTRYATILFRDQLNNYAEHHLIDNKKMFKVIAMNGAVTSFIRKNMSYDNKLRLKDRSDFSHHAYDAAIIALFSNKTKTLYNLIDPSLNGIISKRSEGYWVIEDRYTGEIKELKKEDWTSIKNNVQARKIAKEIEEYLIDLDDEVFFSRKTKRKTNRQLYNETIYGIAAKTDEDGITNYYKKEKFSILDDKDIYLRLLREREKFVINQSNPEVIDQIIEIIESYGKENNIPSRDEAINIKYTKNKINYNLYLKQYMRSLTKSLDKFSEEFINQMIANKTFVLYNPTKNTTRKIKFLRLVNDVKINDIRKNQVINKFNGKNNEPKAFYENINSLGAIVFKNSANNFKTLSINTQIAIFGDKNWDIEDFKTYNMEKIEKYKEIYGIDKTYNFHSFIFPGTILLDKQNKEFYYISSIQTVRDIIEIKFLNKIEFKDENKNQDTSKTPKRLMFGIKSIMNNYEQVDISPFGINKKIFE

SEQ ID NO: 546 - protein, 1233 aa, Mycoplasma canis
MEKKRKVTLGFDLGIASVGWAIVDSETNQVYKLGSRLFDAPDTNLERRTQRGTRRLLRRRKYRNQKFYNLVKRTEVFGLSSREAIENRFRELSIKYPNIIELKTKALSQEVCPDEIAWILHDYLKNRGYFYDEKETKEDFDQQTVESMPSYKLNEFYKKYGYFKGALSQPTESEMKDNKDLKEAFFFDFSNKEWLKEINYFFNVQKNILSETFIEEFKKIFSFTRDISKGPGSDNMPSPYGIFGEFGDNGQGGRYEHIWDKNIGKCSIFTNEQRAPKYLPSALIFNFLNELANIRLYSTDKKNIQPLWKLSSVDKLNILLNLFNLPISEKKKKLTSTNINDIVKKESIKSIMLSVEDIDMIKYEWAGKEPNVYGVGLSGLNIEESAKENKFKFQDLKILNVLINLLDNVGIKFEFKDRNDIIKNLELLDNLYLFLIYQKESNNKDSSIDLFIAKNKSLNIENLKLKLKEFLLGAGNEFENHNSKTHSLSKKAIDAILPKLLDNNEGWNLEAIKNYDEEIKSQIEDNSSLMAKQDKKYLNDNFLKDAILPPNVKVTFQQAILIFNKIIQKFSKDFEIDKVVIELAREMTQDQENDALKGIAKAQKSKKSLVEERLEANNIDKSVFDDKYEKLIYKIFLWISQDFKDPYTGAKISANEIVNNKVEIDHIIPYSLCFDDSSANKVLVHKQSNQEKSNSLPYEYIKQGHSGWNWDEFTKYVKRVFVNNVDSILSKKERLKKSENLLTTSYDGYDKLGFLARNLNDTRYATILFRDQLNNYAEHHLIDNKKMFKVIAMNGAVTSFIRKNMSYDNKLRLKDRSDFSHHAYDAAIIALFSNKTKTLYNLIDPSLNGIISKRSEGYWVIEDRYTGEIKELKKEDWTSIKNNVQARKIAKEIEEYLIDLDDEVFFSRKTKRKTNRQLYNETIYGIAAKTDEDGITNYYKKEKFSILDDKDIYLRLLREREKFVINQSNPEVIDQIIEIIESYGKENNIPSRDEAINIKYTKNKINYNLYLKQYMRSLTKSLDQFSEEFINQMIANKTFVLYNPTKNTTRKIKFLRLVNDVKINDIRKNQVINKFNGKNNEPKAFYENINSLGAIVFKNSANNFKTLSINTQIAIFGDKNWDIEDFKTYNMEKIEKYKEIYGIDKTYNFHSFIFPGTILLDKQNKEFYYISSIQTVRDIIEIKFLNKIEFKDENKNQDTSKTPKRLMFGIKSIMNNYEQVDISPFGINKKIFE

SEQ ID NO: 547 - protein, 1239 aa, Mycoplasma cynos
MEEKRKVTLGFDLGVASVGWAIVDSETNEVYKLGSRLFDIPDTNIDRRAKRGSRRLVRRRSYRNQKFYNLIKRTKTFGFLDKEAIEKEFVLLSIKYPNIIELKVKGLQEEVSKSEAVWILHDYLKNRGYFYDDKEEKDDLENPSIESMPSYKLYEFYKEYGYFKGALSSPTESEKNKDSDLEKAIFFNFSNKEWTKEINHFFKIQKNIFSEDFKAKFMEFFSFIRDISKGPGSENMPSQYSIFGKYGDDGMGGKYQHIWDKNIGKCSIFKDKVRAPKYLPSALFFNLLNELSNIRLYSVDKREKSVLWRLSSKDKINIILNILQIILFKNDGKISNLDINKIVKNESIKSIILNEIDLDLIKDMWFEKEPNVYGIGLSGLNIEENKKENRFKFQDLKIFSVFIDLLKKSNINIEFNNEKDIIHNLKLLDELYFFLITQKYSRDKYGSIKKFILNNKSFNIDNLDEKLNIFLSISDDEFDNHNSKTHSLSKEAIYFIFPKLLHNNEGWNLEAIKNYDIDVREEISKHSFGIKKQDKKYLDDAFLDDAILPPSVKVTIKQSILIFNKIIKKFSNKFQIDNVVIELAREMTQEKEMDAQKSLNRLKKSRKKIIEERLNANNIDSKMFRDKTGEISPNYIYKIYLWISQNFKDPYTGENISANDILKNNVEIDHIIPYSLCFDDSSSNKVLVFKHSNQSKGNFLPFDMISTFSENSVWNWKEYTQYVEKTFKTNLESILDKKERVKKADNLLTSSYDGYDKLGFLARNLNDTRYATILFRDQLINYSENHLIDSKKMFKVIAMNGGVTSFIRKNMSFDSGLKVKDRSIFSHHAYDAAIIALFSNKTKILYNLINPSLDGIISKRSEGYWVLEDRLTGEIRKLNYNDWQSIKNNVEVKKIAREIESHLSNLDNVVMFSRKSKRKTNKELYNETLYGIATRIDENGIKNYYKKEKFNILEDENIYLRLLNERENFIINRSNPEVIDAIIEIFETIDKNKIPARDVAKNIKYTDNKIKYNLYLKDYMRKLVDEFPDKFRKDFIEQMIAKKIFILFNPIKNTTRKIKSLRSINNNKIEDIRKKQVLEKFNTAKNEPRSFYESLNSLGAIIFKNNLNIYKKMSISSQIATFGDKNWKIDDINTYNKEKLNKYKEIYGIDETYDFYSFIFPGTILLDEKNKEFLYISSIQTLKDKIELKFLDRIEFEKKNVNSNLKPKIKREIISTKKLMSDYKIIKISPLGINKKIFE

SEQ ID NO: 548 - protein, 1269 aa, Mycoplasma gallisepticum
MNNSIKSKPEVTIGLDLGVGSVGWAIVDNETNIIHHLGSRLFSQAKTAEDRRSFRGARRLIRRRKYKLKRFINLIWKYNSYFGFKNKEDILNNYQEQQKLHNTVLNLKLEALNAKIDPKALSWILHDYLKNRGHFYEDNRDFNVYPTEELANYFGEYGYYKGIIDSKEDNDDKLEEGLTKYKFSNQHWLEEIKKVLSNQTGLPEKFKEEYESLFSYVRNYSEGPGSINSVSPYGIYHLDEKEGKVVQKYNNIWDKTIGKCSIFPDEYRAPKNSPIAMIFNEINELSTIRSYSIYLTGWFINQEFKKAYLNKLLDLLIKTNSEKPIDARQFKKLREETIAESIGKETLKDVEREEKLEKEDHKWKLKGLKLNTNGKIQYNDLSSLAKFVHKLKQHLKLDFLLEDQYTTLDKINFLQSLFVYLGKHLRYSNRVDSANLKEFSDSNKLFERVLQEQKDDLFKLFEQTDKDDEKILAQTHSLSTKAMLLAITRMTNLDNDEDNQKNNDKGWNFEAIKNFDQKFIDITKKNNNLSLKQDKRYLDDRFINDAILSPGVKRILREATKVFNAILKQFSEEYDVTKVVIELARELSEEKELENTKNYEKLIKKNSDKISERLEALDIAEDKIEDILKSPTKSYKVLLWLQQDHIDPYSQKEIAFEDILTKTEKTEIDHIIPYSISFDDSSSNKLLVLAESNQAKSNQTPYEFITSGNAGIKWEDYEAYCRKFKDGDTSLLDSTQRSKKFAKMMKTDTSSKYDIGFLARNLNDTRYATIVFRDALKDYANNHLVEDKPMFKVVCINGGVTSFLRKNFDKSWYAKKDRDKNIHHAVDASIISIFSNETKTLFNQLTQFADYKLFKNTDGSWKKIDPKTGVVTEVTDENWKQIRVRNQVSEIAKVINKCIQDSNIERKARYSRKIENKTNISLFNDTVYSAKKVGYEDQIKRKNLKTLDIHESAEENKNSKVKKQFVYRKLVNVSLLNNDKLADLFAEKEDILMYRANPWVINLAEQIFNEYTENKKIKSQNVFEKYMLDLTKEFPEKFSEAFVKSMLRNKTAIIYNVEKKVVHRIKRLKILSSELKENKLSNVIIRSKNESGTKLSYQDTINSIALMIMRSIDPTAKKQYIRVPLNTLNLHLGDQDFDLHNIDAYLKKPKFVKYLKANEIGDEYKPWRVLTSGTLLIHKKDKKLMYISSFQNLKDVIEIKNLIETEYKENDDSDPKKKKKANRFLMTLSTILNDYILLDAKDNFDILGLSKNRIDEILNSKLGLDKITK

SEQ ID NO: 549 - protein, 1224 aa, Mycoplasma gallisepticum
MNNSIKSKPEVTIGLDLGVGSVGWAIVDNETNIIHHLGSRLFSQAKTAEDRRSFRGARRLIRRRKYKLKRFINLIWKYNSYFGFKNKEDILNNYQEQQKLHNTVLNLKLEALNAKIDPKALSWILHDYLKNRGHFYEDNRDFNVYPTEELANYFGEYGYYKGIIDSKEDNDDKLEEGLTKYKFSNQHWLEEIKKVLSNQTGLPEKFKEEYESLFSYVRNYSEGPGSINSVSPYGIYHLDEKEGKVVQKYNNIWDKTIGKCSIFPDEYRAPKNSPIAMIFNEINELSTIRSYSIYLTGWFINQEFKKAYLNKLLDLLIKTNSEKPIDARQFKKLREETIAESIGKETLKDVEREEKLEKEDHKWKLKGLKLNTNGKIQYNDLSSLAKFVHKLKQHLKLDFLLEDQYTTLDKINFLQSLFVYLGKHLRYSNRVDSANLKEFSDSNKLFERVLQEQKDDLFKLFEQTDKDDEKILAQTHSLSTKAMLLAITRMTNLDNDEDNQKNNDKGWNFEAIKNFDQKFIDITKKNNNLSLKQDKRYLDDRFINDAILSPGVKRILREATKVFNAILKQFSEEYDVTKVVIELARELSEEKELENTKNYEKLIKKNSDKISERLEALDIAEDKIEDILKSPTKSYKVLLWLQQDHIDPYSQKEIAFEDILTKTEKTEIDHIIPYSISFDDSSSNKLLVLAESNQAKSNQTPYEFITSGNAGIKWEDYEAYCRKFKDGDTSLLDSTQRSKKFAKMMKTDTSSKYDIGFLARNLNDTRYATIVFRDALKDYANNHLVEDKPMFKVVCINGGVTSFLRKNFDKSWYAKKDRDKNIHHAVDASIISIFSNETKTLFNQLTQFADYKLFKNTDGSWKKIDPKTGVVTEVTDENWKQIRVRNQVSEIAKVINKCIQDSNIERKARYSRKIENKTNISLFNDTVYSAKKVGYEDQIKRKNLKTLDIHESAEENKNSKVKKQFVYRKLVNVSLLNNDKLADLFAEKEDILMYRANPWVINLAEQIFNEYTENKKIKSQNVFEKYMLDLTKEFPEKFSEAFVKSMLRNKTAIIYNVEKKVVHRIKRLKILSSELKENKLSNVIIRSKNESGTKLSYQDTINSIALMIMRSIDPTAKKQYIRVPLNTLNLHLGDQDFDLHNIDAYLKKPKFVKYLKANEIGDEYKPWRVLTSGTLLIHKKDKKLMYISSFQNLKDVIEIKNLIETEYKENDDSDPKKRRKQIGS

SEQ ID NO: 550 - protein, 1269 aa, Mycoplasma gallisepticum; identical to SEQ ID NO: 138

SEQ ID NO: 551 - protein, 226 aa, Mycoplasma iowae
MSNKKKITIGLDIGVSSVGWSILREDNVLIDYGSRLFPDAANAKDGKLENEARRSHRSMRRRIRRIKTRKNDLIKLLIKYNIISDQDELAKILEQGIVNETGNVPIVEIKYKGLKEKLSKEELLICLYHYIHKRGYFYITEEDLKENGENINRLPTEIQYDFYMKNGYYIGNEDNQKFSNLIWVKEIEKFLSKQSLDSNFVDEYISLFRRVRDYSDGPGSEKSPTP

SEQ ID NO: 552 - protein, 1304 aa, Mycoplasma synoviae
MLNNVQNLWKYLLLLIFDKKIIFLFKIKVILIRRYMENNNKEKIVIGFDLGVASVGWSIVNAETKEVIDLGVRLFSEPEKADYRRAKRTTRRLLRRKKFKREKFHKLILKNAEIFGLQSRNEILNVYKDQSSKYRNILKLKINALKEEIKPSELVWILRDYLQNRGYFYKNEKLTDEFVSNSFPSKKLHEHYEKYGFFRGSVKLDNKLDNKKDKAKEKDEEEESDAKKESEELIFSNKQWINEIVKVFENQSYLTESFKEEYLKLFNYVRPFNKGPGSKNSRTAYGVFSTDIDPETNKFKDYSNIWDKTIGKCSLFEEEIRAPKNLPSALIFNLQNEICTIKNEFTEFKNWWLNAEQKSEILKFVFTELFNWKDKKYSDKKFNKNLQDKIKKYLLNFALENFNLNEEILKNRDLENDTVLGLKGVKYYEKSNATADAALEFSSLKPLYVFIKFLKEKKLDLNYLLGLENTEILYFLDSIYLAISYSSDLKERNEWFKKLLKELYPKIKNNNLEIIENVEDIFEITDQEKFESFSKTHSLSREAFNHIIPLLLSNNEGKNYESLKHSNEELKKRTEKAELKAQQNQKYLKDNFLKEALVPLSVKTSVLQAIKIFNQIIKNFGKKYEISQVVIEMARELTKPNLEKLLNNATNSNIKILKEKLDQTEKFDDFTKKKFIDKIENSVVFRNKLFLWFEQDRKDPYTQLDIKINEIEDETEIDHVIPYSKSADDSWFNKLLVKKSTNQLKKNKTVWEYYQNESDPEAKWNKFVAWAKRIYLVQKSDKESKDNSEKNSIFKNKKPNLKFKNITKKLFDPYKDLGFLARNLNDTRYATKVFRDQLNNYSKHHSKDDENKLFKVVCMNGSITSFLRKSMWRKNEEQVYRFNFWKKDRDQFFHHAVDASIIAIFSLLTKTLYNKLRVYESYDVQRREDGVYLINKETGEVKKADKDYWKDQHNFLKIRENAIEIKNVLNNVDFQNQVRYSRKANTKLNTQLFNETLYGVKEFENNFYKLEKVNLFSRKDLRKFILEDLNEESEKNKKNENGSRKRILTEKYIVDEILQILENEEFKDSKSDINALNKYMDSLPSKFSEFFSQDFINKCKKENSLILTFDAIKHNDPKKVIKIKNLKFFREDATLKNKQAVHKDSKNQIKSFYESYKCVGFIWLKNKNDLEESIFVPINSRVIHFGDKDKDIFDFDSYNKEKLLNEINLKRPENKKFNSINEIEFVKFVKPGALLLNFENQQIYYISTLESSSLRAKIKLLNKMDKGKAVSMKKITNPDEYKIIEHVNPLGINLNWTKKLENNN

SEQ ID NO: 553 - protein, 1401 aa, Myroides injenensis
MKRILGLDLGTTSIGWAYVHEAENVNETSSIQKVGVRVNPLTTEEQTNFEKGKPITTNASRTLARSARRNLQRYKLRRDNLIQILKENNWINNTTSLTETGNHSTFETYELRNKAASEKLTLDQLSRVLLMLNKKRGYKSSRKVNSKEEGQLIDGMEVAKKLYHEQLTPGQLSLQLMNQGVKKLPDYYRSDLNQELESIWNFQQQFYPNILTDKFKEEINGKGLTSTSSAFWNIYNFNTAENKGSRDEKKKQALQWRSEALSKQLSKEIVAYIIADLNGQIYNSSGYLGAISDRSKELYFNNLTVGQYLFKQLKSNPHTSLKNQVFYRQDYLNEFEKIWETQSKFYPKELTAALKREIRDVIIFYQRKLKSQKGLISFCEFEQKQKTINGKTKTIGHRVIPKSSPLFQEFKIWQQLHNVVLRNKKTNEIVSLADEQKVHLFEELNLKGKLKSNQVLKLIENKPKDWELNYTELEGNNTNKALYNAYLDILDIEGYDVRNELKVKLNKDDIELSDLDVNASEIKEMIFSVFKHLGINTEILEFDATLEDKVFEKQASYQLWHLLYSYEEDNSPTGLDRLYNLLHKKFGFKLNHAKLIGNVLFQDDYGSLSSKAIKNIFPYITENNYYTACELAGYKHSKHSLTKEENETRELKNRLTILPKNSLRNPVVEKIINQMINVVNTLIDEENNILIAQGKEPNFQFDEIRIELARELKKNAKEREELTKSINKSKTDHEKIIKILQKEDGIKNPTRNDIVRFKLYSELKNNGYKDLYTNEYIERKDIFTKEYDIEHIIPQSKLFDDSFSNKTLVRRNVNLKKGNQTAYDFILCEYGQEKANEFETRITNLYNLGKDEGISKSKFKKLLMQESEIGNGFIERDLRETQYIAKKAKSLLLEITRNVISTSGSITDRLREDWGLINVMKELNLQKYRDAGLTEFVKMKDGNKKEVIIDWTKRNDHRHHAMDALTIAFTKHNHIQYLNHLNARKNVNNELHNNIIAIEKLETTLVSDERGNKKRIFKEPIANFRTIAKSHLEAILVSHKAKNKVVTKNINKISGKKISQQTLTPRGQLHKETIYGKIRQYVSKQEKVGPKFTIEVIEQVSNPTYRNLLLKRLEENNNDPKKAFGGKNSLNKNPIYINLEKNIKVPEVLKLVWLEDNYTIRKEISPDLKIDKVIDQGVKQILQNRLAQYKGDSKLAFSNLDANPIWLNEDKGIAIKRVTISGIATAQPLHRKKDHLGQPILDHNGQEIPVDFISTGNNHHVAIYEDENGKLQESVVSHFEAVERVNQKLPIIDKTFNQHLGWKFLFTMKQNELFLFPSDDFNPNEIDLFDKQNYTVISKHLFRIQKLSTKDYSFRHHLETNVEEIKDLKTITWRREGLNGIQNIIKVRTNHLGEIIHIGEY

SEQ ID NO: 554 - protein, 1466 aa, Myroides odoratus
MKNILGLDLGTNSIGWALVKEDFENKQGEILGLGSRIIPMSQDILGEFGRGNSISQTADRTGYRGVRRLRERHLLRRERLHRVLNILGFLPNHYAKEIDFTKRLGKFINHAEPKLSFDKEFIFKDSFNEMLKDFQQNQPGFIINKHGEEALVPYDWTIYYLRKKALTQKIDKEELAWILLNFNQKRGYYQLRGEEEEENTNKLVEFYSLKIIDVIADNEVNKKGEVWYSLHLENGWIYRRSSKISLVDWKDKVRDFIVTTDVNDDGSEKLDKDGVVKRSFRAPSADDWTLLKKKTEQDIDNSNKTVGAYIYENLLLNPKQKIKGKLVRTIERKFYKDELKQILEKQKEFHQELQNEQLLQDCVRELYKYNEQHQQMLESKDFVHLFLNDIIFYQRPLRSQKSLISNCTLEKRVSRDGVVFPIKVISKSNPYYQEFRLLQWLQNLAIYRKDDDVNVTQEFLNSIESWENLLQFLNAKKEIKQEQLIKFLLEQKGLKGNSLKTAILTYRWNYVTDKVYPMNETRSLIQDKLKKVENVATDFLSFDNEMALWHIIYSVNDKIEYEKALAKFASKHNLDEISFVESFKKFPPFKSDYGSFSEKAIKKLLPLMRFGSVWNKNNIVPSVLDRIDKILTGEYDEKIKIRVREKAEQFQLNQIEDFQNLPLWLAQYVVYDRHSEAEIAGKWNSVKDLENYLKEFKQHSLRNPIVEQIITETLRVVKDIWQQYGNGVQNFFDEIHIELGREMKNTADERKRITNSVTENENTNLRIKALLVELKEDTNIENVRPHSPMQQEILKIYEEGVLNAVENIDEDILKISKTAQPSKSELIRYKLWLEQKYQSPYTGEMIPLSRLFTSDYEIEHVIPQSRYFDDSLSNKVICEAAVNKRKDNQLGLEFIKNHHSEKIELGNGRTAQVLEVEAYESFVKKNYDKNRGKRNKLLLEDVPEKMIERQLNDTRYISKFVTHLLSNIVRKDEVNSKDDGINSKNIIPGNGKITSQLKQDWGLNDVWNELILPRFERMNNLTNSTDFTSTNTNGKIIPTVPLEYSKGFSKKRIDHRHHALDALVIALATRDHVNLLNNESALPKKDRTKEEQKSFRFDLQVNLRNKEKYFNVKEGREKEKFTTFKKPWNTLTQDTRDALENMVVSFKQNLRVINKATNYYESYTDENGNLRLDKYGNPKKELISQKGTNWAIRKSLHKETVSGQIHLDRVKVTKGKIVTATRKSLDSSFNEKSIESITDTGIQKILRNYLKAKDNKPDVAFSPEGIEELNKSISVYNEGKNHQPIIKVRIFEQGSKFPVGETGNKIAKFVEAAKGTNLFFGIYQDKTGKRSYDTIPLNLVIERLKQGLSPVPETNEKGHQLLFHLSPNDLVYVPTIDDNEQLDSNRVYKFTDSSDTTCNFIPSNISAIIFNINSKEQEKRGINYPIQNELGVGSPQSKNQKSFDGFMIKEVCIKLKVDRLGNISKT

SEQ ID NO: 555 - protein, 241 aa, Neisseria lactamica
MAAFKPNPMNYILGLDIGIASVGWAMVEIDKEENPIRLIDLGVRVFERAEMPKTGDSLAMARRLARSVRRLTRRRAHRLLRARRLLKREGVLQDADFDENGLVKSLPNTPWQLRAAALDRKLTCLEWSAVLLHLIKHRGYLSQRKNEGETADKELGALLKGVADNAHALQTGDFRTPAELALNKFEKESGHIRNQRGDYSHTFSRKDLQAELNLLFEKQKEFGNPHVSDGLKEGIETLLMA

SEQ ID NO: 556 - protein, 666 aa, Neisseria lactamica
MAAFKPNPMNYILGLDIGIASVGWAMVEVDEEENPIRLIDLGVRVFERAEVPKTGDSLAMARRLARSVRRLTRRRAHRLLRARRLLKREGVLQDADFDENGLVKSLPNTPWQLRAAALDRKLTCLEWSAVLLHLVKHRGYLSQRKNEGETADKELGALLKGVADNAHALQTGDFRTPAELALNKFEKESGHIRNQRGDYSHTFSRKDLQAELNLLFEKQKEFGNPHVSDGLKEDIETLLMAQRPALSGDAVQKMLGHCTFEPAEPKAAKNTYTAERFIWLTKLNNLRILEQGSERPLTDTERATLMDEPYRKSKLTYAQARKLLGLEDTAFFKGLRYGKDNAEASTLMEMKAYHAISRALEKEGLKDKKSPLNLSTELQDEIGTAFSLFKTDKDITGRLKDRVQPEILEALLKHISFDKFVQISLKALRRIVPLMEQGKRYDEACAEIYGDHYCKKNAEEKIYLPPIPADEIRNPVVLRALSQARKVINCVVRRYGSPARIHIETAREVGKSFKDRKEIEKRQEENRKDREKAAAKFREYFPNFVGEPKSKDILKLRLYEQQHGKCLYSGKEINLVRLNEKGYVEIDHALPFSRTWDDSFNNKVLVLGSENQNKGNQTPYEYFNGKDNSREWQEFKARVETSRFPRSKNNGFCCKNSMKKDLKNAT

SEQ ID NO: 557 - protein, 828 aa, Neisseria lactamica
MLGHCTFEPAEPKAAKNTYTAERFIWLTKLNNLRILEQGSERPLTDTERATLMDEPYRKSKLTYAQARKLLGLEDTAFFKGLRYGKDNAEASTLMEMKAYHAISRALEKEGLKDKKSPLNLSTELQDEIGTAFSLFKTDKDITGRLKDRVQPEILEALLKHISFDKFVQISLKALRRIVPLMEQGKRYDEACAEIYGDHYGKKNTEEKIYLPPIPADEIRNPVVLRALSQARKVINAVVRRYDSPARIHIETAREVGKSFKDRKEIEKRQEENRKDREKAAAKFREYFPNFVGEPKSKDILKLRLYEQQHGKCLYSGKEINLVRLNEKGYVEIDHALPFSRTWDDSFNNKVLVLGSENQNKGNQTPYEYFNGKDNSREWQEFKARVETSRFPRSKKQRILLQKFDEEGFKERNLNDTRYVNRFLCQFVADHILLTGKGKRRVFASNGQITNLLRGFWGLRKVRAENDRHHALDAVVVACSTVAMQQKITRFVRYKEMNAFDGKTIDKETGEVLHQKAHFPQPWEFFAQEVMIRVFGKPDGKPEFEEADTSEKLRTLLAEKLSSRPEAVHEYVTPLFVSRAPNRKMSGQGHMETVKSAKRLDEGISVLRVPLTQLKLKDLEKMVNREREPKLYDALKAQLETHKDDPAKAFAEPFYKYDKAGSRTQQVKAVRIEQVQKTGVWVRNHNGIADNATMVRVDVFEKGGKYYLVPIYSWQVAKGILPDRAVVAFKDEEDWTVMDDSFEFRFVLYANDLIKAELKKETFFGYFSGLDRSTGNISLRSHDLDKTKGKDGVYRIGIKTALSFQKHQIDELGKEIRPCRLKKRPPVR

SEQ ID NO: 558 - protein, 408 aa, Neisseria lactamica
MNDTRYVNRFLCQFVADHILLTGKGKRRVFASNGQITNLLRGFWGLRKVRTENDRHHALDAVVVACSTVAMQQKITRFVRYKEMNAFDGKTIDKETGEVLHQKAHFPQPWEFFAQEVMIRVFGKPDGKPEFEEADTPEKLRTLLAEKLSSRPEAVHEYVTPLFVSRAPNRKMSGQGHMETVKSAKRLDEGISVLRVPLTQLKLKGLEKMVNREREPKLYDALKAQLETHKDDPAKAFAEPFYKYDKAGSRTQQVKAVRIEQVQKTGVWVRNHNGIADNATMVRVDVFEKGGKYYLVPIYSWQVAKGILPDRAVVAFKDEEDWTVMDDSFEFRFVLYANDLIKLTAKKNEFLGYFVSLNRATGAIDIRTHDTDSTKGKNGIFQSVGVKTALSFQKTKSTNSAKKSDHAV

SEQ ID NO: 559 - protein, 1082 aa, Neisseria meningitidis
MAAFKPNPINYILGLDIGIASVGWAMVEIDEDENPICLIDLGVRVFERAEVPKTGDSLAAARRLARSVRRLTRRRAHRLLRARRLLKREGVLQAADFDENGLIKSLPNTPWQLRAAALDRKLTPLEWSAVLLHLIKHRGYLSQRKNEGETADKELGALLKGVADNAHALQTGDFRTPAELALNKFEKESGHIRNQRGDYSHTFSRKDLQAELILLFEKQKEFGNPHVSGGLKEGIETLLMTQRPALSGDAVQKMLGHCTFEPAEPKAAKNTYTAERFIWLTKLNNLRILEQGSERPLTDTERATLMDEPYRKSKLTYAQARKLLGLEDTAFFKGLRYGKDNAEASTLMEMKAYHAISRALEKEGLKDKKSPLNLSPELQDEIGTAFSLFKTDEDITGRLKDRVQPEILEALLKHISFDKFVQISLKALRRIVPLMEQGKRYDEACAEIYGDHYGKKNTEEKIYLPPIPADEIRNPVVLRALSQARKVINGVVRRYGSPARIHIETAREVGKSFKDRKEIEKRQEENRKDREKAAAKFREYFPNFVGEPKSKDILKLRLYEQQHGKCLYSGKEINLGRLNEKGYVEIDHALPFSRTWDDSFNNKVLVLGSENQNKGNQTPYEYFNGKDNSREWQEFKARVETSRFPRSKKQRILLQKFDEDGFKERNLNDTRYVNRFLCQFVADRMRLTGKGKKRVFASNGQITNLLRGFWGLRKVRAENDRHHALDAVVVACSTVAMQQKITRFVRYKEMNAFDGKTIDKETGEVLHQKTHFPQPWEFFAQEVMIRVFGKPDGKPEFEEADTPEKLRTLLAEKLSSRPEAVHEYVTPLFVSRAPNRKMSGQGHMETVKSAKRLDEGVSVLRVPLTQLKLKDLEKMVNREREPKLYEALKARLEAHKDDPAKAFAEPFYKYDKAGNRTQQVKAVRVEQVQKTGVWVRNHNGIADNATMVRVDVFEKGDKYYLVPIYSWQVAKGILPDRAVVQGKDEEDWQLIDDSFNFKFSLHPNDLVEVITKKARMFGYFASCHRGTGNINIRIHDLDHKIGKNGILEGIGVKTALSFQKYQIDELGKEIRPCRLKKRPPVR

SEQ ID NO: 560 - protein, 976 aa, Neisseria meningitidis
MAAFKPNPINYILGLDIGIASVGWAMVEIDEDENPICLIDLGVRVFERAEVPKTGDSLAAARRLARSVRRLTRRRAHRLLRARRLLKREGVLQAADFDENGLIKSLPNTPWQLRAAALDRKLTPLEWSAVLLHLIKHRGYLSQRKNEGETADKELGALLKGVADNAHALQTGDFRTPAELALNKFEKESGHIRNQRGDYSHTFSRKDLQAELILLFEKQKEFGNPHVSGGLKEGIETLLMTQRPALSGDAVQKMLGHCTFEPAEPKAAKNTYTAERFIWLTKLNNLRILEQGSERPLTDTERATLMDEPYRKSKLTYAQARKLLGLEDTAFFKGLRYGKDNAEASTLMEMKAYHAISRALEKEGLKDKKSPLNLSPELQDEIGTAFSLFKTDEDITGRLKDRIQPEILEALLKHISFDKFVQISLKALRRIVPLMEQGKRYDEACAEIYGDHYGKKNTEEKIYLPPIPADEIRNPVVLRALSQARKVINGVVRRYGSPARIHIETAREVGKSFKDRKEIEKRQEENRKDREKAAAKFREYFPNFVGEPKSKDILKLRLYEQQHGKCLYSGKEINLGRLNEKGYVEIDHALPFSRTWDDSFNNKVLVLGSENQNKGNQTPYEYFNGKDNSREWQEFKARVETSRFPRSKKQRILLQKFDEDGFKERNLNDTRYVNRFLCQFVADRMRLTGKGKKRVFASNGQITNLLRGFWGLRKVRAENDRHHALDAVVVACSTVAMQQKITRFVRYKEMNAFDGKTIDKETGEVLHQKTHFPQPWEFFAQEVMIRVFGKPDGKPEFEEADTPEKLRTLLAEKLSSRPEAVHEYVTPLFVSRAPNRKMSGQGHMETVKSAKRLDEGVSVLRVPLTQLKLKDLEKMVNREREPKLYEALKARLEAHKDDPAKAFAEPFYKYDKAGNRTQQVKAVRVEQVQKTGVWVRNHNGIADNATMVRVDVFEKGDKYYLVPIYSWQVAKGIFAG

SEQ ID NO: 561 - protein, 1081 aa, Neisseria meningitidis
MAAFKPNPINYILGLDIGIASVGWAMVEIDEDENPICLIDLGVRVFERAEVPKTGDSLAAARRLARSVRRLTRRRAHRLLRARRLLKREGVLQAADFDENGLIKSLPNTPWQLRSAALDRKLTPLEWSAVLLHLIKHRGYLSQRKNEGETADKELGALLKGVADNAHALQTGDFRTPAELALNKFEKESGHIRNRRGDYSHTFSRKDLQAELDLLFEKQKEFGNPHISDDLKEGIETLLMTQRPALSGDAVQKMLGHCTFEPTEPKAAKNTYTAERFVWLTKLNNLRILEQGSERPLTDTERATLMDEPYRKSKLTYAQARKLLELDDTAFFKGLRYGKDNAEASTLMEMKAYHAISRALEKEGLKDKKSPLNLSPELQDEIGTAFSLFKTDEDITGRLKDRVQPEILEVLLKHISFDKFVQISLKALRRIVPLMEQGKRYDEACAEIYGDHDGKKNTEEKIYLPPIPADEIRNPVVLRALSQARKVINAVVRRYGSPARIHIETAREVGKSFKDRKEIEKRQEENRKDREKAAAKFREYFPNFVGEPKSKDILKLRLYEQQHGKCLYSGKEINLGRLNEKGYVEIDHALPFSRTWDDSFNNKVLVLGSENQNKGNQTPYEYFNGKDNSREWQEFKARVETSRFPRSKKQRILLQKFDEEGFKERNLNDTRYVNRFLCQFVADHMLLTGKGKRRVFASNGQITNLLRGFWGLRKVRAENNRHHALDAVVVACSTVAMQQKITRFVRYKEMNAFDGKTIDKETGEVLHQKTHFPQPWEFFAQEVMIRVFGKPDGKPEFEEADTPEKLRTLLAEKLSSRPEAVHEYVTPLFVSRAPNRKMSGQGHMETVKSAKRLDEGVSVLRVPLTQLKLKDLEKMVNREREPKLYEALKARLEAHKDDPAKAFAEPFYKYDKAGNRTQQVKAVRVEQVQKTGVWVRNHNGIADNATMVRVDVFEKAGKYYLVPIYSWQVAKGILPDRAVVAYADEEGWTVIDESFRFKFVLYSNDLIKVQLKKDSFLGYFSGLDRATGAISLREHDLEKSKGKDGMHRIGVKTALSFQKYQIDEMGKEIRLCRLKKRPPVR

SEQ ID NO: 562 - protein, 1081 aa, Neisseria meningitidis
MAAFKPNPINYILGLDIGIASVGWAMVEIDEDENPICLIDLGVRVFERAEVPKTGDSLAAARRLARSVRRLTRRRAHRLLRARRLLKREGVLQAADFDENGLIKSLPNTPWQLRSAALDRKLTPLEWSAVLLHLIKHRGYLSQRKNEGETADKELGALLKGVANNAHALQTGDFRTPAELALNKFEKESGHIRNQRGDYSHTFSRKDLQAELILLFEKQKEFGNPHVSGGLKEGIETLLMTQRPALSGDAVQKMLGHCTFEPAEPKAAKNTYTAERFIWLTKLNNLRILEQGSERPLTDTERATLMDEPYRKSKLTYAQARKLLGLEDTAFFKGLRYGKDNAEASTLMEMKAYHAISRALEKEGLKDKKSPLNLSPELQDEIGTAFSLFKTDEDITGRLKDRIQPEILEALLKHISFDKFVQISLKALRRIVPLMEQGKRYDEACAEIYGDHYGKKNTEEKIYLPPIPADEIRNPVVLRALSQARKVINGVVRRYGSPARIHIETAREVGKSFKDRKEIEKRQEENRKDREKAAAKFREYFPNFVGEPKSKDILKLRLYEQQHGKCLYSGKEINLGRLNEKGYVEIDHALPFSRTWDDSFNNKVLVLGSENQNKGNQTPYEYFNGKDNSREWQEFKARVETSRFPRSKKQRILLQKFDEDGFKERNLNDTRYVNRFLCQFVADRMRLTGKGKKRVFASNGQITNLLRGFWGLRKVRAENDRHHALDAVVVACSTVAMQQKITRFVRYKEMNAFDGKTIDKETGEVLHQKTHFPQPWEFFAQEVMIRVFGKPDGKPEFEEADTPEKLRTLLAEKLSSRPEAVHEYVTPLFVSRAPNRKMSGQGHMETVKSAKRLDEGVSVLRVPLTQLKLKDLEKMVNREREPKLYEALKARLEAHKDDPAKAFAEPFYKYDKAGNRTQQVKAVRVEQVQKTGVWVRNHNGIADNATMVRVDVFEKAGKYYLVPIYSWQVAKGILPDRAVVAYADEEGWTVIDESFRFKFVLYSNDLIKVQLKKDSFLGYFSGLDRATGAISLREHDLEKSKGKDGMHRIGVKTALSFQKYQIDEMGKEIRLCRLKKRPPVR

SEQ ID NO: 563 - protein, 1082 aa, Neisseria meningitidis
MAAFKPNPINYILGLDIGIASVGWAMVEIDEDENPICLIDLGVRVFERAEVPKTGDSLAMARRLARSVRRLTRRRAHRLLRARRLLKREGVLQAADFDENGLIKSLPNTPWQLRAAALDRKLTPLEWSAVLLHLIKHRGYLSQRKNEGETADKELGALLKGVADNAHALQTGDFRTPAELALNKFEKESGHIRNQRGDYSHTFSRKDLQAELILLFEKQKEFGNPHVSGGLKEGIETLLMTQRPALSGDAVQKMLGHCTFEPAEPKAAKNTYTAERFIWLTKLNNLRILEQGSERPLTDTERATLMDEPYRKSKLTYAQARKLLGLEDTAFFKGLRYGKDNAEASTLMEMKAYHAISRALEKEGLKDKKSPLNLSPELQDEIGTAFSLFKTDEDITGRLKDRIQPEILEALLKHISFDKFVQISLKALRRIVPLMEQGKRYDEACAEIYGDHYGKKNTEEKIYLPPIPADEIRNPVVLRALSQARKVINGVVRRYGSPARIHIETAREVGKSFKDRKEIEKRQEENRKDREKAAAKFREYFPNFVGEPKSKDILKLRLYEQQHGKCLYSGKEINLGRLNEKGYVEIDHALPFSRTWDDSFNNKVLVLGSENQNKGNQTPYEYFNGKDNSREWQEFKARVETSRFPRSKKQRILLQKFDEDGFKERNLNDTRYVNRFLCQFVADRMRLTGKGKKRVFASNGQITNLLRGFWGLRKVRAENDRHHALDAVVVACSTVAMQQKITRFVRYKEMNAFDGKTIDKETGEVLHQKTHFPQPWEFFAQEVMIRVFGKPDGKPEFEEADTPEKLRTLLAEKLSSRPEAVHEYVTPLFVSRAPNRKMSGQGHMETVKSAKRLDEGVSVLRVPLTQLKLKDLEKMVNREREPKLYEALKARLEAHKDDPAKAFAEPFYKYDKAGNRTQQVKAVRVEQVQKTGVWVRNHNGIADNATMVRVDVFEKGDKYYLVPIYSWQVAKGILPDRAVVQGKDEEDWQLIDDSFNFKFSLHPNDLVEVITKKARMFGYFASCHRGTGNINIRIHDLDHKIGKNGILEGIGVKTALSFQKYQIDELGEEIRPCRLKKRPPVR

SEQ ID NO: 564 - protein, 1082 aa, Neisseria meningitidis
MAAFKPNPINYILGLDIGIASVGWAMVEIDEDENPICLIDLGVRVFERAEVPKTGDSLAMARRLARSVRRLTRRRAHRLLRARRLLKREGVLQAADFDENGLIKSLPNTPWQLRAAALDRKLTPLEWSAVLLHLIKHRGYLSQRKNEGETADKELGALLKGVADNAHALQTGDFRTPAELALNKFEKESGHIRNQRGDYSHTFSRKDLQAELILLFEKQKEFGNPHVSGGLKEGIETLLMTQRPALSSDAVQKMLGHCTFEPAEPKAAKNTYTAERFIWLTKLNNLRILEQGSERPLTDTERATLMDEPYRKSKLTYAQARKLLGLEDTAFFKGLRYGKDNAEASTLMEMKAYHAISRALEKEGLKDKKSPLNLSPELQDEIGTAFSLFKTDEDITGRLKDRIQPEILEALLKHISFDKFVQISLKALRRIVPLMEQGKRYDEACAEIYGDHYGKKNTEEKIYLPPIPADEIRNPVVLRALSQARKVINGVVRRYGSPARIHIETAREVGKSFKDRKEIEKRQEENRKDREKAAAKFREYFPNFVGEPKSKDILKLRLYEQQHGKCLYSGKEINLGRLNEKGYVEIDHALPFSRTWDDSFNNKVLVLGSENQNKGNQTPYEYFNGKDNSREWQEFKARVETSRFPRSKKQRILLQKFDEDGFKERNLNDTRYVNRFLCQFVADRMRLTGKGKKRVFASNGQITNLLRGFWGLRKVRAENDRHHALDAVVVACSTVAMQQKITRFVRYKEMNAFDGKTIDKETGEVLHQKTHFPQPWEFFAQEVMIRVFGKPDGKPEFEEADTPEKLRTLLAEKLSSRPEAVHEYVTPLFVSRAPNRKMSGQGHMETVKSAKRLDEGVSVLRVPLTQLKLKDLEKMVNREREPKLYEALKARLEAHKDDPAKAFAEPFYKYDKAGNRTQQVKAVRVEQVQKTGVWVRNHNGIADNATMVRVDVFEKGDKYYLVPIYSWQVAKGILPDRAVVQGKDEEDWQLIDDSFNFKFSLHPNDLVEVITKKARMFGYFASCHRGTGNINIRIHDLDHKIGKNGILEGIGVKTALSFQKYQIDELGKEIRPCRLKKRPPVR

SEQ ID NO: 565 - protein, 1082 aa, Neisseria meningitidis
MAAFKPNPINYILGLDIGIASVGWAMVEIDEDENPICLIDLGVRVFERAEVPKTGDSLAMARRLARSVRRLTRRRAHRLLRARRLLKREGVLQAADFDENGLIKSLPNTPWQLRAAALDRKLTPLEWSAVLLHLIKHRGYLSQRKNEGETADKELGALLKGVADNAHALQTGDFRTPAELALNKFEKESGHIRNQRGDYSHTFSRKDLQAELILLFEKQKEFGNPHVSGGLKEGIETLLMTQRPALSSDAVQKMLGHCTFEPAEPKAAKNTYTAERFIWLTKLNNLRILEQGSERPLTDTERATLMDEPYRKSKLTYAQARKLLGLEDTAFFKGLRYGKDNAEASTLMEMKAYHAISRALEKEGLKDKKSPLNLSPELQDEIGTAFSLFKTDEDITGRLKDRIQPEILEALLKHISFDKFVQISLKALRRIVPLMEQGKRYDEACAEIYGDHYGKKNTEEKIYLPPIPADEIRNPVVLRALSQARKVINGVVRRYGSPARIHIETAREVGKSFKDRKEIEKRQEENRKDREKAAAKFREYFPNFVGEPKSKDILKLRLYEQQHGKCLYSGKEINLGRLNEKGYVEIDHALPFSRTWDDSFNNKVLVLGSENQNKGNQTPYEYFNGKDNSREWQEFKARVETSRFPRSKKQRILLQKFDEDGFKERNLNDTRYVNRFLYQFVADRMRLTGKGKKRVFASNGQITNLLRGFWGLRKVRAENDRHHALDAVVVACSTVAMQQKITRFVRYKEMNAFDGKTIDKETGEVLHQKTHFPQPWEFFAQEVMIRVFGKPDGKPEFEEADTPEKLRTLLAEKLSSRPEAVHEYVTPLFVSRAPNRKMSGQGHMETVKSAKRLDEGVSVLRVPLTQLKLKDLEKMVNREREPKLYEALKARLEAHKDDPAKAFAEPFYKYDKAGNRTQQVKAVRVEQVQKTGVWVRNHNGIADNATMVRVDVFEKGDKYYLVPIYSWQVAKGILPDRAVVQGKDEEDWQLIDDSFNFKFSLHPNDLVEVITKKARMFGYFASCHRGTGNINIRIHDLDHKIGKNGILEGIGVKTALSFQKYQIDELGKEIRPCRLKKRPPVR

SEQ ID NO: 566 - protein, 1081 aa, Neisseria meningitidis
MAAFKPNPINYILGLDIGIASVGWAMVEIDEDENPICLIDLGVRVFERAEVPKTGDSLAMARRLARSVRRLTRRRAHRLLRARRLLKREGVLQAADFDENGLIKSLPNTPWQLRAAALDRKLTPLEWSAVLLHLIKHRGYLSQRKNEGETADKELGALLKGVADNAHALQTGDFRTPAKLALNKFEKESGHIRNQRGDYSHTFSRKDLQAELNLLFEKQKEFGNPHISDGLKEGIETLLMTQRPALSGDAVQKMLGHCTFEPTEPKAAKNTYTAERFVWLTKLNNLRILEQGSEQPLTDTQRAKLMDEPYRKSKLTYAQARKLLGLEDTAFFKGLRYGKDNAEASTLMEMKAYHAISRALEKEGLKDKKSPLNLSPELQDEIGTAFSLFKTDEDITGRLKDRVQPEILEALLKHISFDKFVQISLKALRRIVPLMEQGKRYNEACAEIYGDHYGKKNTEEKIYLPPIPADEIRNPVVLRALSQARKVINGVVRRYGSPARIHIETAREVGKSFKDRKEIEKRQEENRKDREKAAAKFQEYFPNFVGEPKSKDILKLRLYEQQHGKCLYSGKEINLGRLNEKGYVEIDHALPFSRTWDDSFNNKVLVLGSENQNKGNQTPYEYFNGKDNSREWQEFKARVETSRFPRSKKQRILLQKFDEDGFKERNLNDTRYVNRFLCQFVADRMRLTGKGKKRVFASNGQITNLLRGFWGLRKVRAENDRHHALDAVVVACSTVAMQQKITRFVRYKEMNAFDGKTIDKETGEVLHQKTHFPQPWEFFAQEVMIRVFGKPDGKPEFEEADTPEKLRTLLAEKLSSRPEAVHEYVTPLFVSRAPNRKMSGQGHMETVKSAKRLDEGVSVLRVPLTQLKLKDLEKMVNREREPKLYEALKARLEAHKDDPAKAFAEPFYKYDKAGNRTQQVKAVRVEQVQKTGVWVRNHNGIADNATMVRVDVFEKGDKYYLVPIYSWQVAKGILPDRAVVAYADEEDWTVIDESFRFKFVLYSNDLIKVQLKKDSFLGYFSGLDRATGAISLREHDLEKSKGKDGMHRIGVKTALSFQKYQIDEMGKEIRPCRLKKRPPVR

SEQ ID NO: 567 - protein, 1081 aa, Neisseria meningitidis
MAAFKPNPINYILGLDIGIASVGWAMVEIDEEENPIRLIDLGVRVFERAEVPKTGDSLAMARRLARSVRRLTRRRAHRLLRARRLLKREGVLQAADFDENGLIKSLPNTPWQLRAAALDRKLTPLEWSAVLLHLIKHRGYLSQRKNEGETADKELGALLKGVADNAHALQTGDFRTPAELALNKFEKECGHIRNQRGDYSHTFSRKDLQAELNLLFEKQKEFGNPHVSGGLKEGIETLLMTQRPALSGDAVQKMLGHCTFEPAEPKAAKNTYTAERFIWLTKLNNLRILEQGSERPLTDTERATLMDEPYRKSKLTYAQARKLLSLEDTAFFKGLRYGKDNAEASTLMEMKAYHTISRALEKEGLKDKKSPLNLSPELQDEIGTAFSLFKTDEDITGRLKDRIQPEILEALLKHISFDKFVQISLKALRRIVPLMEQGKRYDEACAEIYGDHYGKKNTEEKIYLPPIPADEIRNPVVLRALSQARKVINGVVRRYGSPARIHIETAREVGKSFKDRKEIEKRQEENRKDREKAAAKFREYFPNFVGEPKSKDILKLRLYEQQHGKCLYSGKEINLGRLNEKGYVEIDHALPFSRTWDDSFNNKVLVLGSENQNKGNQTPYEYFNGKDNSREWQEFKARVETSRFPRSKKQRILLQKFDEDGFKERNLNDTRYVNRFLCQFVADRMRLTGKGKKRVFASNGQITNLLRGFWGLRKVRAENDRHHALDAVVVACSTVAMQQKITRFVRYKEMNAFDGKTIDKETGEVLHQKTHFPQPWEFFAQEVMIRVFGKPDGKPEFEEADTPEKLRTLLAEKLSSRPEAVHEYVTPLFVSRAPNRKMSGQGHMETVKSAKRLDEGVSVLRVPLTQLKLKDLEKMVNREREPKLYEALKARLEAHKDDPAKAFAEPFYKYDKAGNRTQQVKAVRVEQVQKTGVWVRNHNGIADNATMVRVDVFEKGDKYYLVPIYSWQVAKGILPDRAVVAYADEEDWTVIDESFRFKFVLYSNDLIKVQLKKDSFLGYFSGLDRATGAISLREHDLEKSKGKDGMHRIGVKTALSFQKYQIDEMGKEIRPCRLKKRPPVR

SEQ ID NO: 568 - protein, 1082 aa, Neisseria meningitidis
MAAFKPNPINYILGLDIGIASVGWAMVEIDEEENPIRLIDLGVRVFERAEVPKTGDSLAMARRLARSVRRLTRRRAHRLLRARRLLKREGVLQAADFDENGLIKSLPNTPWQLRAAALDRKLTPLEWSAVLLHLIKHRGYLSQRKNEGETADKELGALLKGVADNAHALQTGDFRTPAELALNKFEKECGHIRNQRGDYSHTFSRKDLQAELNLLFEKQKEFGNPHVSGGLKEGIETLLMTQRPALSGDAVQKMLGHCTFEPAEPKAAKNTYTAERFIWLTKLNNLRILEQGSERPLTDTERATLMDEPYRKSKLTYAQARKLLGLEDTAFFKGLRYGKDNAEASTLMEMKAYHAISRALEKEGLKDKKSPLNLSPELQDEIGTAFSLFKTDEDITGRLKDRIQPEILEALLKHISFDKFVQISLKALRRIVPLMEQGKRYDEACAEIYGDHYGKKNTEEKIYLPPIPADEIRNPVVLRALSQARKVINGVVRRYGSPARIHIETAREVGKSFKDRKEIEKRQEENRKDREKAAAKFREYFPNFVGEPKSKDILKLRLYEQQHGKCLYSGKEINLVRLNEKGYVEIDHALPFSRTWDDSFNNKVLVLGSENQNKGNQTPYEYFNGKDNSREWQEFKARVETSRFPRSKKQRILLQKFDEEGFKERNLNDTRYVNRFLCQFVADHILLTGKGKRRVFASNGQITNLLRGFWGLRKVRAENDRHHALDAVVVACSTVAMQQKITRFVRYKEMNAFDGKTIDKETGEVLHQKTHFPQPWEFFAQEVMIRVFGKPDGKPEFEEADTPEKLRTLLAEKLSSRPEAVHEYVTPLFVSRAPNRKMSGQGHMETVKSAKRLDEGVSVLRVPLTQLKLKDLEKMVNREREPKLYEALKARLEAHKDDPAKAFAEPFYKYDKAGNRTQQVKAVRVEQVQKTGVWVRNHNGIADNATMVRVDVFEKGGKYYLVPIYSWQVAKGILPDRAVVQGKDEEDWQLIDDSFNFKFSLHPNDLVEVITKKARMFGYFASCHRGTGNINIRIHDLDHKIGKNGILEGIGVKTALSFQKYQIDELGKEIRPCRLKKRPPVR

SEQ ID NO: 569 - protein, 1081 aa, Neisseria meningitidis
MAAFKPNPINYILGLDIGIASVGWAMVEIDEEENPIRLIDLGVRVFERAEVPKTGDSLAMARRLARSVRRLTRRRAHRLLRARRLLKREGVLQAADFDENGLIKSLPNTPWQLRAAALDRKLTPLEWSAVLLHLIKHRGYLSQRKNEGETADKELGALLKGVADNAHALQTGDFRTPAELALNKFEKESGHIRNQRGDYSHTFSRKDLQAELILLFEKQKEFGNPHVSGGLKEGIETLLMTQRPALSGDAVQKMLGHCTFEPAEPKAAKNTYTAERFIWLTKLNNLRILEQGSERPLTDTERATLMDEPYRKSKLTYAQARKLLGLEDTAFFKGLRYGKDNAEASTLMEMKAYHAISRALEKEGLKDKKSPLNLSPELQDEIGTAFSLFKTDEDITGRLKDRVQPEILEALLKHISFDKFVQISLKALRRIVPLMEQGKRYDEACAEIYGDHYGKKNTEEEIYLPPITADEIRNPVVLRALSQARKVINAVVRRYGSPARIHIETAREVGKSFKDRKEIEKRQEENRKDREKAAAKFREYFPNFVGEPKSKDILKLRLYEQQHGKCLYSGKEINLVRLNEKGYVEIDHALPFSRTWDDSFNNKVLVLGSENQNKGNQTPYEYFNGKENSREWQEFKARVETSRFPRSKKQRILLQKFDEDGFKERNLNDTRYVNRFLCQFVADRMRLTGKGKKRVFASNGQITNLLRGFWGLHKVRAENDRHHALDAVVVACSTIAMQQKITRFVRYKEMNAFDGKTIDKETGEVLHQKAHFPQPWEFFAQEVMIRVFGKPDGKPEFEEADTPEKLRTLLAEKLSSRPEAVHEYVTPLFVSRAPNRKMSGQGHMETVKSAKRLDEGISVLRVPLTQLKLKDLEKMVNRAREPKLYEALKARLEAHKDDPAKAFAEPFYKYDKAGNRTQQVKAVRVEQVQKTGVWVRNHNGIADNATMVRVDVFEKAGKYYLVPIYSWQVAKGILPDRAVVAYADEEDWTVIDESFRFKFVLYSNDLIKVQLKKDSFLGYFSGLDRATGAISLREHDLEKSKGKDGMHRIGVKTALSFQKYQIDEMGKEIRPCRLKKRPPVR

SEQ ID NO: 570 - protein, 1082 aa, Neisseria meningitidis
MAAFKPNPINYILGLDIGIASVGWAMVEIDEEENPIRLIDLGVRVFERAEVPKTGDSLAMARRLARSVRRLTRRRAHRLLRARRLLKREGVLQAADFDENGLIKSLPNTPWQLRAAALDRKLTPLEWSAVLLHLIKHRGYLSQRKNEGETADKELGALLKGVANNAHALQTGDFRTPAELALNKFEKESGHIRNQRGDYSHTFSRKDLQAELILLFEKQKEFGNPHVSGGLKEGIETLLMTQRPALSGDAVQKMLGHCTFEPAEPKAAKNTYTAERFIWLTKLNNLRILEQGSERPLTDTERATLMDEPYRKSKLTYAQARKLLGLEDTAFFKGLRYGKDNAEASTLMEMKAYHAISRALEKEGLKDKKSPLNLSSELQDEIGTAFSLFKTDEDITGRLKDRVQPEILEALLKHISFDKFVQISLKALRRIVPLMEQGKRYDEACAEIYGDHYGKKNTEEKIYLPPIPADKIRNPVVLRALSQARKVINGVVRRYGSPARIHIETAREVGKSFKDRKEIEKRQEENRKDREKAAAKFREYFPNFVGEPKSKDILKLRLYEQQHGKCLYSGKEINLVRLNEKGYVEIDHALPFSRTWDDSFNNKVLVLGSENQNKGNQTPYEYFNGKDNSREWQEFKARVETSRFPRSKKQRILLQKFDEDGFKECNLNDTRYVNRFLCQFVADHILLTGKGKRRVFASNGQITNLLRGFWGLRKVRAENDRHHALDAVVVACSTVAMQQKITRFVRYKEMNAFDGKTIDKETGKVLHQKTHFPQPWEFFAQEVMIRVFGKPDGKPEFEEADTPEKLRTLLAEKLSSRPEAVHEYVTPLFVSRAPNRKMSGAHKDTLRSAKRFVKHNEKISVKRVWLTEIKLADLENMVNYKNGREIELYEALKARLEAYGGNAKQAFDPKDNPFYKKGGQLVKAVRVEKTQESGVLLNKKNAYTIADNGDMVRVDVFCKVDKKGKNQYFIVPIYAWQVAENILPDIDCKGYRIDDSYTFCFSLHKYDLIAFQKDEKSKVEFAYYINCDSSNGRFYLAWHDKGSKEQQFRISTQNLVLIQKYQVNELGKEIRPCRLKKRPPVR

SEQ ID NO: 571 - protein, 1082 aa, Neisseria meningitidis
MAAFKPNPINYILGLDIGIASVGWAMVEIDEEENPIRLIDLGVRVFERAEVPKTGDSLAMARRLARSVRRLTRRRAHRLLRARRLLKREGVLQAADFDENGLIKSLPNTPWQLRAAALDRKLTPLEWSAVLLHLIKHRGYLSQRKNEGETADKELGALLKGVANNAHALQTGDFRTPAELALNKFEKESGHIRNQRGDYSHTFSRKDLQAELILLFEKQKEFGNPHVSGGLKEGIETLLMTQRPALSGDAVQKMLGHCTFEPAEPKAAKNTYTAERFIWLTKLNNLRILEQGSERPLTDTERATLMDEPYRKSKLTYAQARKLLGLEDTAFFKGLRYGKDNAEASTLMEMKAYHAISRALEKEGLKDKKSPLNLSSELQDEIGTAFSLFKTDEDITGRLKDRVQPEILEALLKHISFDKFVQISLKALRRIVPLMEQGKRYDEACAEIYGDHYGKKNTEEKIYLPPIPADEIRNPVVLRALSQARKVINGVVRRYGSPARIHIETAREVGKSFKDRKEIEKRQEENRKDREKAAAKFREYFPNFVGEPKSKDILKLRLYEQQHGKCLYSGKEINLVRLNEKGYVEIDHALPFSRTWDDSFNNKVLVLGSENQNKGNQTPYEYFNGKDNSREWQEFKARVETSRFPRSKKQRILLQKFDEDGFKECNLNDTRYVNRFLCQFVADHILLTGKGKRRVFASNGQITNLLRGFWGLRKVRAENDRHHALDAVVVACSTVAMQQKITRFVRYKEMNAFDGKTIDKETGKVLHQKTHFPQPWEFFAQEVMIRVFGKPDGKPEFEEADTPEKLRTLLAEKLSSRPEAVHEYVTPLFVSRAPNRKMSGAHKDTLRSAKRFVKHNEKISVKRVWLTEIKLADLENMVNYKNGREIELYEALKARLEAYGGNAKQAFDPKDNPFYKKGGQLVKAVRVEKTQESGVLLNKKNAYTIADNGDMVRVDVFCKVDKKGKNQYFIVPIYAWQVAENILPDIDCKGYRIDDSYTFCFSLHKYDLIAFQKDEKSKVEFAYYINCDSSNGRFYLAWHDKGSKEQQFRISTQNLVLIQKYQVNELGKEIRPCRLKKRPPVR

SEQ ID NO: 572 - protein, 1082 aa, Neisseria meningitidis
MAAFKPNPINYILGLDIGIASVGWAMVEIDEEENPIRLIDLGVRVFERAEVPKTGDSLAMARRLARSVRRLTRRRAHRLLRTRRLLKREGVLQAANFDENGLIKSLPNTLWQLRAAALDRKLTPLEWSAVLLHLIKHRGYLSQRKNEGETADKELGALLKGVAGNAHALQTGDFRTPAELALNKFEKESGHIRNQRGDYSHTFSRKDLQAELNLLFEKQKEFGNPHISDGLKEGIETLLMTQRPALSGDAVQKMLGHCTFEPTEPKAAKNTYTTERFIWLTKLNNLRILEQGSERPLTDTERATLMDEPYRKSKLTYAQARKLLELDDIAFFKGLRYGKDNAEASTLMEMKAYHAISRALEKEGLKDKKSPLNLSPELQDEIGTAFSLFKTDEDITGRLKDRIQPEILEALLKHINFDKFVQISLKALRRIVPLMEQGKRYDEACAEIYGDHYGKKNTEEKIDLPPIPADEIHNPVVLRALSQARKVINGVVRRYGSPARIHIETAREVGKSFKDRKEIEKRQEENRKDREKAAAKFREYFPNFVGEPKSKDILKLRLYEQQHGKCLYSGKEINLGRLNEKGYVEIDHALPFSRTWDDSFNNKVLVLGSENQNKGNQTPYEYFNGKDNSREWQEFKARVETSRFPRSKKQRILLQKFDEDGFKERNLNDTRYVNRFLCQFVADRMRLTGKGKKRVFASNGQITNLLRGFWGLRKVRAENDRHHALDAVVVACSTVAMQQKITRFVRYKEMNAFDGKTIDKETGEVLHQKTHFPQPWEFFAQEVMIRVFGKPDGKPEFEEADTPEKLRTLLTEKLSSRPEAVHEYVTPLFVSRAPNRKMSGQGHMETVKSAKRLDEGISVLRVPLTQLKLKDLEKMVNREREPKLYEALKARLEAHKDDPAKAFAEPFYKYDKAGNRTQQVKAMRVEQVQKTGVWVRNHNGIADNATMVRVDVFEKGDKYYLVPIYSWQVAKGILPDRAVVQGKDEEDWQLIDDSFNFKFSLHPNDLVEVITKKARMFGYFASCHRGTGNINIRIHDLDHKIGKNGILEGIGVKTALSFQKYQIDELGKEIRPCRLKKRPPVR

SEQ ID NO: 573 - protein, 1082 aa, Neisseria meningitidis
MAAFKPNPINYILGLDIGIASVGWAMVEIDEEENPIRLIDLSVRVFERAEVPKTGDSLAMARRLARSVRRLTRRRAHRLLRARRLLKREGVLQAADFDENGLIKSLPNTPWQLRAAALDRKLTPLEWSAVLLHLIKHRGYLSQRKNEGETADKELGALLKGVADNAHALQTGDFRTPAELALNKFEKESGHIRNQRGDYSHTFSRKDLQAELILLFEKQKEFGNPHVSGGLKEGIETLLMTQRPALSGDAVQKMLGHCTFEPAEPKAAKNTYTAERFVWLTKLNNLRILEQGSERPLTDTERATLMDEPYRKSKLTYAQARKLLGLEDTAFFKGLRYGKDNAEASTLMEMKAYHAISRALEKEGLKDKKSPLRLSPELQDEIGTAFSLFKTDEDITGRLKDRVQPEILEALLKHISFDKFVQISLKALRRIVPLMEQGKRYDEACAEIYGDHYGKKNAEEKIYLPPIPADEIRNPVVLRALSQARKVINGVVRRYGSPARIHIETAREVGKSFKDRKEIEKRQEENRKDREKAAAKFREYFPNFVGEPKSKDILKLRLYEQQHGKCLYSGKEINLGRLNEKGYVEIDHALPFSRTWDDSFNNKVLVLGSENQNKGNQTPYEYFNGKDNSREWQEFKARVETSRFPRSKKQRILLQKFDEDGFKERNLNDTRYVNRFLCQFVADRMRLTGKGKKRVFASNGQITNLLRGFWGLRKVRAENDRHHALDAVVVACSTVAMQQKITRFVRYKEMNAFDGKTIDKETGEVLHQKTHFPQPWEFFAQEVMIRVFGKPDGKPEFEEADTPEKLRTLLAEKLSSRPEAVHEYVTPLFVSRAPNRKMSGQGHMETVKSAKRLDEGVSVLRVPLTQLKLKDLEKMVNREREPKLYEALKARLEAHKDDPAKAFAEPFYKYDKAGNRTQQVKAVRVEQVQKTGVWVRNHNGIADNATMVRVDVFEKGDKYYLVPIYSWQVAKGILPDRAVVQGKDEEDWQLIDDSFNFKFSLHPNDLVEVITKKARMFGYFASCHRGTGNINIRIHDLDHKIGKNGILEGIGVKTALSFQKYQIDELGKEIRPCRLKKRPPVR

SEQ ID NO: 574 - protein, 1082 aa, Neisseria meningitidis
MAAFKPNSINYILGLDIGIASVGWAMVEIDEEENPIRLIDLGVRVFERAEVPKTGDSLAMARRLARSVRRLTRRRAHRLLRTRRLLKREGVLQAANFDENGLIKSLPNTPWQLRAAALDRKLTPLEWSAVLLHLIKHRGYLSQRKNEGETADKELGALLKGVAGNAHALQTGDFRTPAELALNKFEKESGHIRNQRSDYSHTFSRKDLQAELILLFEKQKEFGNPHVSGGLKEGIETLLMTQRPALSGDAVQKMLGHCTFEPAEPKAAKNTYTAERFIWLTKLNNLRILEQGSERPLTDTERATLMDEPYRKSKLTYAQARKLLGLEDTAFFKGLRYGKDNAEASTLMEMKAYHAISRALEKEGLKDKKSPLNLSPELQDEIGTAFSLFKTDEDITGRLKDRIQPEILEALLKHISFDKFVQISLKALRRIVPLMEQGKRYDEACAEIYGDHYGKKNTEEKIYLPPIPADEIRNPVVLRALSQARKVINGVVRRYGSPARIHIETAREVGKSFKDRKEIEKRQEENRKDREKAAAKFREYFPNFVGEPKSKDILKLRLYEQQHGKCLYSGKEINLGRLNEKGYVEIDHALPFSRTWDDSFNNKVLVLGSENQNKGNQTPYEYFNGKDNSREWQEFKARVETSRFPRSKKQRILLQKFDEDGFKERNLNDTRYVNRFLCQFVADRMRLTGKGKKRVFASNGQITNLLRGFWGLRKVRAENDRHHALDAVVVACSTVAMQQKITRFVRYKEMNAFDGKTIDKETGEVLHQKTHFPQPWEFFAQEVMIRVFGKPDGKPEFEEADTLEKLRTLLAEKLSSRPEAVHEYVTPLFVSRAPNRKMSGQGHMETVKSAKRLDEGVSVLRVPLTQLKLKDLEKMVNREREPKLYEALKARLEAHKDDPAKAFAEPFYKYDKAGNRTQQVKAVRVEQVQKTGVWVRNHNGIADNATMVRVDVFEKGDKYYLVPIYSWQVAKGILPDRAVVQGKDEEDWQLIDDSFNFKFSLHPNDLVEVITKKARMFGYFASCHRGTGNINIRIHDLDHKIGKNGILEGIGVKTALSFQKYQIDELGKEIRPCRLKKRPPVR

SEQ ID NO: 575 - protein, 67 aa, Neisseria meningitidis
MFGYFASCHRGTGNINIRIHDLDHKIGKNGILEGIGVKTALSFQKYQIDELGKEIRPCRLKKRPPVR

SEQ ID NO: 576 - protein, 220 aa, Neisseria mucosa
MRHIFSDGLKEGIETLLMTQRPALSGDAVQKMLGHCTFEPTEPKAAKNTYTAERFIWLTKLNNLRILEQGSERPLTNTERATLMDEPYRKSKLTYAQARKLLGLKDTAFFKGLRYGKDNAEASTLMEMKAYHAISRALEKEGLKDKKSPLNLSPELQDEIGTAFSLFKTDEDITGRLKTELTPASNKTLSRPFTVKSASNGSTSAPWLPSTKWFLHFKPA

SEQ ID NO: 577 - protein, 392 aa, Neisseria sp.
MAPFTLKPLNYILGLDIGIASVGWAVVETDSDVLPYRLIDVGVRTFDRAEVPKTGESPAAARRLARSVRRMIRRRAHRMLRARRLLKREGMLQAADFDAHGLVENLPVNPWQLRVDALSRKLMPLEWAAVLLHMVKHRGYLSQRKNERNSSDKELGALLSGVAANSEALQGGDFRTPAELAVNKFEKESGHIRNQRGDYSHTFNRKDVQAELVLLFEKQKEYGNPYISDGLLTGVEDLLMTQRAALSGDAVQKMLGRCTFEPEEYKAAKNTYSAERFVWLTKLNNLRILDQGSERPLTDSERAKLMDEPYKKTKLTYAQVRRLLELDDTAFFKGLRYSKDNAESATLMEMKAYHSISGALEKAGLKNKKIAAGLIARIAGRNRRGVFAIQNR

SEQ ID NO: 578 - protein, 701 aa, Neisseria sp.
MQDEIGEAFSLFKTDEDIRGRLKGKLPDEQLDALLEYVSFDKFVQLSLKALRKILPLMEQGKRYDEACAEIYGDHYGIKDDKQAQFLPPVSADEIRNPVVLRALSQARKVVNAVVRRYGSPARVHIETAREVGKSFLDRKKIEKRQEENRKDRERSIAKFREYFPNFVGEPKAKDILKMRLYEQQQGQCLYSGKAIDLRRLNEKGYVEIDHALPFSRTWDDSFNNKVLVLAGENQNKRNQTPFEWLGGDEKRWREFTARVEHCRFPRSKKQRILMQKLDEKDFKERNLNDTRYVNRFLCNFIAQNMLLTGEDKNRVFASNGQITNLLRGMWGLKKVRESNDRHHALDAVVVACSTVAMQQKITNYVRQKEMNVFDGEMVDKTTGEVSRLHFPQPWDFFRQEVMMRVFGKPDTPSENNEEADTPEKLRALLADKLSSRPEAVHEAVTPLFVSRAPSRKMSGQGHMETIKSAKRLSEGKSVLRVPLTQLTPKLLENMVNREREPQLYEDLLGRLNAHGGDPAKAFAAPFFKRDKAGNPTQQVKAVRVEDVQKSGVIVREGNGVADNATMVRVDVFEKGGKYYLMPIYTWQAAKGILPNKAVIAHTDEANWQEMDTSFTFKFALYPNDLVLASLKKETYFGYFAGLDRSTGNISLRVHDLEKSKGKDGVYRIGVKTALSFQKYQVDELGKTIRPCRLKKRPPVR

SEQ ID NO: 579 - protein, 1089 aa, Neisseria sp.
MTAFKPNPLNYILGLDIGIASVGWAMVEIDDKENPVRLIDLGVRVFERAEMPKTGDSLAAARRLARSVRRLTRRRAHRLLRARRLLKHEGVLKPEDFDENGLVKPLPYIPKQPRNTPWQLRAAALDRKLTPLEWAAVLLHLVKHRGYLSQRKNEGETDDKELGALLKGVADNTHALQAGNFRTPAELALNKFEKESGHIRNQRGDYSHTFSRKDLQAELVLLFEKQKEFGNPYVSDDLKNGIENLLMTQRPALSGDAIQKMLGHCTFEPAEPKAAKNTYTAERFIWLTKLNNLRILNQGNERPLTDAERTTLMDEPYKKSKLTYAQARKLLDLDDTAFFKGLRYGKDNAESATLMEMKAYHAISRALEKEGLKDKKSPLSLSPELQDEIGTAFSLFKTDEEITGRLKGCLQPEILDALLKHISFDKFVQISLKALRRIVPLMEQGKRYDEACAEIYGDHHGRRNSEETLYLPPIPADEIRNPVVLRALSQARKVINGVGRRYGSPARIHIETAREVGKSFKDRKEIEKRQEENRKDREKAAAEFQEYFPNFVGEPKSKDILKLRLYRQQNCKCLYSGKEINLGRLNEKGYVEIDHALPFSRTWDDSFNNKVLVLGSENQNKGNRTPYEYLNGKDNSREWQEFKARVETSRFPHSKKQRILLQKFDEEGFKERNLNDTRYVNRFLCKFVADHMQLTGKGKRRVFASNGQITNLLRGFWGLRKVRAENDRHHALDAVVVACSTVAMQQRITRFVRYKEMNAFDGKTVDKETGEVLHQKTHFPQPWEFFAQEVMIRVFGKPDGKPELEEADTPEKLRALLAEKLSSRPEAVHEYVAPLFVSRAPNRKMSGQGHMETIKSPKRLDEGISVVRVPLTQLKLKDLEKMVNREREPKLYEALKARLEAHKDDPAKAFAEPFYKQDKAGNRTQQVKAVRIEQVQKTGVWVRNQNGIADNATMVRVDVFEKGGKYYLVPIYSWQVAKGILPDKAIIAFKDEEEWQLIDDSFNFKFPLHPNDLVEVITKKARIFGYFASCHRGTGNINIRIHDLDNKVGKNGILEGIGVKTALSFQKYQIDELGKEIRPCRLKKRPPVR

SEQ ID NO: 580 - protein, 1097 aa, Neisseria wadsworthii
MKKQPQRYILGLDLGIASVGWALILVDGAENPVGLLDCGVRTFERAEVPKTGDSLALARRQARSVRRLIRRRAHRLLRLRRLLKREGILSAADFNSDGLPNLPIDAWQLRVAGLERKLTNQEWAAVLLHLVKHRGYLSQRKSETQTENKELGRLLAGVAENSKLLSESSEQYRTPAELAVKLFAEQSGHLRNKGGEYTHTFNRLDLQKELHLLFERQYALGNPFASAELQSKVDELLMTQRSALQGEAVLKMLGKCTFEPSEYKAAKNTYSAERFIWLTKLNNLRILYNGEERALDEGDRKKLLDEPYKKAKLTYKQVRSILNLPESAVFKGLRYGKDSDGLKAENGTLMEMKAYHKIRTILDKAGLKGEWENRIRNPEILDKIGTAFSLYKTDEDIQAALADLRLPENVLDALLAGLNFDKFIQLSLKALRNILPLMERGIRYDEACKEVYGDHRALAESKNQVLLPPIPADEIRNPVVLRTLTQARKVINAIIRRYGSPQRVHIETARELGKSKQERDKIDRKNKENQNDRNRLASDIRKHFNFEPTPKDILKLRLYEQQHGKCLYSDLREEKGECLYTGNVIELHRLFEDGYVEIDHALPLSRTWDNSLNNKVLVLKSSNQNKGNKTPYEWLDGANNSRRWREFQARVQGCHFPYVKKQRIQTAKLDSKAEQGFLERNLNDTRYISKFMCQFITANLRLAETSNALMEEVAGENPYWKERKRQRVFAPSGSIIALLRGLWGLKKVREDNDRHHALDAIVVACSTVSMQQKITKAMQRRETLETVDSETGEVKTRIPQPWDFFRQEVMIRVFSDSPREELAEKLNSRPEALHDFVSPLFVSRAPNRKMTGQGHLETVKSAKRLSENISVVRKPLTALKLKDIENIVGYPDREPALYQALRERLLAHKDDPVKAFADKPFYKPAKDGGQGSLVKAVRIIENTKHGLKIRNGITDTNGDMVRTDVYQKTDKKGKRQYFIVPVYAWQVEKNELPTVDCKGYEIDDNYEFCFSLYKYDLIEIQNPNDINQELRAYYINCDSSDGRFWLAYHDKSAKEQQFRISTQNQPIIKKYQVDTLGKEIRLCKAEKRTALNGKKKK

SEQ ID NO: 581 - protein, 1426 aa, Niabella soli
MPRKNILGLDLGTTSIGFAKIIEDDDYQCSSVELIGVRVNPLTTDEQTNFEKGKPVSVNADRTLKRGMRRNLDRYQLRRDYLIEILRTHHIITADTKLAEDGKNTTHTTYALRALAATAEIPLEAFVRVLLAINKKRGYKSSRKAKNEDEGQLIDGMAIARRLYEESLTPGQFSYQLLKEGKKYLPDFYRSDLNTELNKVWNFQKQFYPEILTDEFKRHLEGKGQRATAVAFWGQHGFSMAENKGSREEKKLHAYKWRSEAAHKQLTKEEVAFVITEINNDLNKSSGYLGAISDRSKELFFNKQTVGQYLHQQLKENPHTRLKGQVFYRQDYLDEFETIWEMQAKFYSALTLELKEEVRDVVIFYQRKLKSQMGLISLCEFESKEIEIEKNGEKAKKRIGLRVAPKSSPLFQEFKIWQVLNNLEFRNKKTKEVFVPEMAAKQQLFDELNIKGNLLASEAIKILGYKTKDWEANYHTLEGNRTNKSLYDAWLKILELEGYDENLLKLSGSDDIDVSKIEKPALEIRQMVLAVFEVLGISGAILDFDAEADGKAFEQQPAYQLWHLLYSAEDDGKKYSQEDIFTYGHDNIGLKKKLCEKFGFRPEHTKILVNVVFSDDYGNLSSKAMRRIYPFIKELTYDKACAEAGYRHSAASLTKEEIAARPLQNRLDLLKKNELRSPVVEKILNQMVNVVNTLVDDENQNRKARGLSEDFHFDEIRIELARELKKNAKERAEMTTNINTAKQSHEKIIRILQTEFGVPNPSRNDIVRYKLYEELKNNGYKDLYTNTYISRDILFSKQIDVDHIIPQMSLFDDSFSNKTVVFRKDNQDKGNKTAYDYILGKYGEQALEEYISRITSLFELGKKNKEEGIGKAKFQKLQKRLVDIGDGFIERDLRESQYIAKKANNMLYAICRSVVSTSGEITARLREDWDLVNVMQEINLPKFRALGLTEMVEKKDGAQKERITDWTKRNDHRHHAMDALAIAFTRHSHIQYLNHLNARKDEANKWHPVVSKIEEKETVLIYDDLGNRKRKFKAPMPNFREVVKEHLENVLISHKAKNKVVTKNKNKIKTVRGEKVKTELTPRGQLHKETIYGRYRYYESKEEKIGPKFDAEMIGMVTNPQYKKLLLERLAANGNDPKKAFWGKNALNKNPLYVDEARQELLPEKILLRWLNDDYSIRKDVTPENLKDIKTIEKILDKGVKKILLKRLADFGNDPKKAFSDLDKNPIWQNEAKRIAIKRVTISGIKNAAPLHHKKDHLGNDILDEKGKQIPSSFVSTGNNHHVAIYRDAEGNLQERVVSLFDAVQLVNGGEPVIDKEYNKGIGWQFLFTMKQNEMFVFPDEKTGFNPREVDLLSSGNRKLISPNLFRVQKLASKNYFFRHHLETSVEEKKELKNIAYKPQLGLNALSNIVKVRINHIGEIVSVGEY

SEQ ID NO: 582 - protein, 79 aa, Nitritalea halalkaliphila
MPLRLPERVYKMISSTGAECHFLPVNVSSLIKGYDAKSKLGEFGSQNKQEVTSDSFIRVKERCYKLEINRLGIPLNRLK

SEQ ID NO: 583 - protein, 1498 aa, Odoribacter laneus
METTLGIDLGTNSIGLALVDQEEHQILYSGVRIFPEGINKDTIGLGEKEESRNATRRAKRQMRRQYFRKKLRKAKLLELLIAYDMCPLKPEDVRRWKNWDKQQKSTVRQFPDTPAFREWLKQNPYELRKQAVTEDVTRPELGRILYQMIQRRGFLSSRKGKEEGKIFTGKDRMVGIDETRKNLQKQTLGAYLYDIAPKNGEKYRFRTERVRARYTLRDMYIREFEIIWQRQAGHLGLAHEQATRKKNIFLEGSATNVRNSKLITHLQAKYGRGHVLIEDTRITVTFQLPLKEVLGGKIEIEEEQLKFKSNESVLFWQRPLRSQKSLLSKCVFEGRNFYDPVHQKWIIAGPTPAPLSHPEFEEFRAYQFINNIIYGKNEHLTAIQREAVFELMCTESKDFNFEKIPKHLKLFEKFNFDDTTKVPACTTISQLRKLFPHPVWEEKREEIWHCFYFYDDNTLLFEKLQKDYALQTNDLEKIKKIRLSESYGNVSLKAIRRINPYLKKGYAYSTAVLLGGIRNSFGKRFEYFKEYEPEIEKAVCRILKEKNAEGEVIRKIKDYLVHNRFGFAKNDRAFQKLYHHSQAITTQAQKERLPETGNLRNPIVQQGLNELRRTVNKLLATCREKYGPSFKFDHIHVEMGRELRSSKTEREKQSRQIRENEKKNEAAKVKLAEYGLKAYRDNIQKYLLYKEIEEKGGTVCCPYTGKTLNISHTLGSDNSVQIEHIIPYSISLDDSLANKTLCDATFNREKGELTPYDFYQKDPSPEKWGASSWEEIEDRAFRLLPYAKAQRFIRRKPQESNEFISRQLNDTRYISKKAVEYLSAICSDVKAFPGQLTAELRHLWGLNNILQSAPDITFPLPVSATENHREYYVITNEQNEVIRLFPKQGETPRTEKGELLLTGEVERKVFRCKGMQEFQTDVSDGKYWRRIKLSSSVTWSPLFAPKPISADGQIVLKGRIEKGVFVCNQLKQKLKTGLPDGSYWISLPVISQTFKEGESVNNSKLTSQQVQLFGRVREGIFRCHNYQCPASGADGNFWCTLDTDTAQPAFTPIKNAPPGVGGGQIILTGDVDDKGIFHADDDLHYELPASLPKGKYYGIFTVESCDPTLIPIELSAPKTSKGENLIEGNIWVDEHTGEVRFDPKKNREDQRHHAIDAIVIALSSQSLFQRLSTYNARRENKKRGLDSTEHFPSPWPGFAQDVRQSVVPLLVSYKQNPKTLCKISKTLYKDGKKIHSCGNAVRGQLHKETVYGQRTAPGATEKSYHIRKDIRELKTSKHIGKVVDITIRQMLLKHLQENYHIDITQEFNIPSNAFFKEGVYRIFLPNKHGEPVPIKKIRMKEELGNAERLKDNINQYVNPRNNHHVMIYQDADGNLKEEIVSFWSVIERQNQGQPIYQLPREGRNIVSILQINDTFLIGLKEEEPEVYRNDLSTLSKHLYRVQKLSGMYYTFRHHLASTLNNEREEFRIQSLEAWKRANPVKVQIDEIGRITFLNGPLC

SEQ ID NO: 584 - protein, 1389 aa, Oenococcus kitaharae; identical to SEQ ID NO: 241

SEQ ID NO: 585 - protein, 1535 aa, Ornithobacterium rhinotracheale
MNTILGLDLGTNSIGWALIKVLNDKTRLPLEIIDLGVVVIPTDQRTLDKFSKGESISKTAERTKQKGVRKLYERKKLRRERLHRVLNILGFLPEHYSKKIDFKKHLGQFFGNSQPKISYVENDHGKHEFIFMDSYREMLKEFSKHNIKNVPYDWTIYYLRKKALSQKISKEELAWVILNFNKKRGYYQFRDDNADENKENKIEKYYALKVTNVKKEDAQNYTITLENGWIYKNKSKISLLDWVGSTKEFISTEKFDNKGNIIKKKNGEDDRTLKLVDSEKDWIAIKKSTEDRIENYGKTVGTYLYEHLLKDPNQKLNGELINIIDRKFYKNELKQILEKQKEFHPELLNEDLFQKSIIELYPKNSTRQKELKNKDLCYLLIDDVIYYQRDLKKKNSTINKCSFESREYYLNGEKQIQKINCIAKSKPLYQEFRTLQFIKNLKVYEIIDGLEKDITSKLLPDFETKEHFFEWLNDKEKIDQLQLLSYKCFDLHDNVKNDLIAKGIKRPTEKAIRTELLEKYRWNYSKDNDRNFLLNETRFKILKYLKKVDKKLTLTNEQIESLWLLLYSAKDERELKNGLQKFSEKNKLPKKFSDIFISFPPFKKEYGAYSEKALKKLLSLVRFGKYWSFNKIDNNIQNKIMNILNGEVDDSISDRVREKTILLQDKNDFQDLPLWLASYVAYNRFSEVSEIKYWDSPDKIEFLKQHSIGNPIVEKIINETLKLIKDIWVIHGKSCKNFFSEIHIELSREIKSSSKKRAQITNNNTKNQKLNNLIKSLLIEMASDTKYENVTPYSPSQQEILKIYDEGIYSKEENSEKIKEINKIRNNNKISKSDITKYKLWLEQGYISPYTGKIIPLTKLFTAKYQKEHIIPQTKFFDDSFNNKVICEAEVNKLKDNSLAMNFIKAKGGKAVKLSDGETVTILNQEEYKQLVRTSFKKNSIKLRNLLLEEIPDTFTKRQLNDTKYISKLVLSLLSNIVREKGELESTAKRIVSTNGQITSILRNDWGLNNIWNKLITPRFERLNNINKNKIYGNWENKKGKNVFQINYLNDNLSTLNTKRIDHRHHALDALIVACTTRNHINFLNNQYAKSRNQRHDLRAKLKRRETITTEGSKKQVFKDFIKPWESFTQDALKKLETTIVNFKVNKRIINKTINWYKKWEKQKDGTYKKIQKKQTKGDAWAIRKPLHIDTIYGIVCKKLPLKSALENYKNIIDENLKHKIKELKEVNKFDNNQIINFFKECNFIFEDNNIQKVEVYDFKDNRDKTILSSSRQLIDESFTPKKIGKVLDPTIRNILLKHLNSTKYNNKFDSDGNPIKPEKLAFSPEGLKDLNKNIKHLNNNKEHQPIKRVKLFETLGNKIKVGYTQQKNKKFAETATGTNLFLGIYSDNNKRDFKTIPLILAIQREKEGLNPCPDTDEKGNQLLFSLSPNELVFVPNNEERKNPNLVDFENLSKDQIDRIYKFVSCTGSEAYFVPSRTAKPIIENENGTNNKSQRIIEFNEKTSIKNEKNEPVLIKTICWKIEVNRLGKIIKVIK

SEQ ID NO: 586 - protein, 103 aa, Parabacteroides merdae
MIVYRLFYRFLFKATKLVNFVIHKELKRQIARTGKIKFHSGGCGCQSGNYKMQNFEKGKSITTNADRTLKRSMRRNLYRCKLRRDVLIELLKKVGFIPEKQWK

SEQ ID NO: 587 - protein, 82 aa, Parabacteroides merdae
MSIWKLQYPPLDLKIYNKFLVYSRVNPLTVDEMQNFEKGKSITTNADRTLKRSMRRNLQRYKLRRDVLIELLKKVGFMSEKQ

SEQ ID NO: 588 - protein, 84 aa, Parabacteroides merdae
MSIWKLQYPPLDLKIYNKFLVYSRVNPLTVDEMQNFEKGKSITTNADRTLKRSMRRNLYRCKLRRDVLIELLKKVGFIPEKQWK

SEQ ID NO: 589 - protein, 398 aa, Pasteurella bettyae
MLANENQNKGNLTPYEWLDGKNNSKRWQDFVARVQTCCFSHRKKQHILSHKLDEKSFIERNLNDTRYVARFLCNFIADNMLLTGKGKRKVFASNGQITALLRGRWGLQKVRDDNDRHHALDAVVIACSTVAMQQKITRFVKYEEGNVFSGERIDRETGEIIPLYFPTPWKFFKENVEIRIFSENPKLELENRLPDYPQYNHEFVQPLFVSRMPTRKMTGQGHMETIKSAKRLDEGISVLKVPLTQLKLADLENMVNRERELALYEALKERLELFGNDPAKAFIEPFYKKGGALVKAVRVKKVQKSGVLVRDGNGVADNALMVRVDVFTKGGKYFLVPIYTWQVAKGILPNKAVTANIDEIDWLEMDESYQFIFTMYPNDLVKVKLKKEEFFGYYGGLD

SEQ ID NO: 590 - protein, 610 aa, Pasteurella bettyae
MNMLKPLNYILGLDLGIGSVGWAVVEIDEQGNPLRLIDVGVRTFERAEVAKTGESLALARRLARSSRRLVKRRAARIKKAKRLLKAENILLSVDEILPNDVWQLRVKGLDHKLERQEWAAVLLHLLKRRGYLSQRKNESKSENKELGALLSGVVTNHQILQTDEYRTPAEIAVHKFQAEDGHIRNQRGDYTHTFSRLDLLAEMELLFQRQTELGNLHTSSKLLENLTALLMWQKPALAGEAILKMLGKCTFEPTEYKAAKNSYSAERFVWLTKLNNLRILEQGAERALTDSERFVLLDQPYEKAKLTYAQVRTLLKLSDEAIFKGVRYQGEDKKTVESKTTLMEMKAYHQIRKALDGADLKDEWNTLKNDSALLDEIGTAFSLYKTDDDISHYLGGKLSEKVLNVLLENLNFDKFIQLSLKALQKILPLMLQGQRYDEAVSAVYGDHYGKKSAESCRLLPAIPANEIHNPVVLRTLTQARKVINAVVRLYGSPARIHIETGRKVGKSYQDRKKLEKQQEENREQRESAVKKFKEYFPNFVGEPKGKDILKLRLYELQQSKCLYSGKSFDPNRLLEKGYVEVDHALPFSRTWDDSFNNKVCLPMKTRIKAI

SEQ ID NO: 591 - protein, 199 aa, Pasteurella multocida
MACATPSMQQKITRFIRFKEVHPYKIENRYEMVDQESGEIISPHFPEPWAYFRQEVNIRVFDNHPDTVLKEMLPDRPQANHQFVQPLFVSRAPTRKMSGQGHMETIKSAKRLAEGISVLRIPLTQLKPNLLENMVNKEREPALYAGLKARLAEFNQDPAKAFTTPFYKQGGQQVKAIRVEQVQKSGVLVRENNGVADNA

SEQ ID NO: 592 - protein, 63 aa, Pasteurella multocida
MQTTNLSYILGLDLGIASVGWAVVEINENEDPIGLIDVGVRIFERAEVPKTGESLALSRRLAR

SEQ ID NO: 593 - protein, 1058 aa, Pasteurella multocida
MQTTNLSYILGLDLGIASVGWAVVEINENEDPIGLIDVGVRIFERAEVPKTGESLALSRRLARSTRRLIRRRAHRLLLAKRFLKREGILSTTDLEKGLPNQAWELRVAGLERRLSAIEWGAVLLHLIKHRGYLSKRKNESQTNNKELGALLSGVAQNHQLLQSDDYRTPAELALKKFAKEEGHIRNQRGAYTHTFNRLDLLAELNLLFAQQHQFGNPHCKEHIQQYMTELLMWQKPALSGEAILKMLGKCTHEKNEFKAAKHTYSAERFVWLTKLNNLRILEDGAERALNEEERQLLINHPYEKSKLTYAQVRKLLGLSEQAIFKHLRYSKESAESATFMELKAWHAIRKALENQGLKDTWQDLAKKPDLLDEIGTAFSLYKTDEDIQQYLEGKLPDSVINALLVSLNFDKFIELSLKSLRKILPLMEQGKRYDQACHEIYGHHYGEKNQQISQLLPVIPTQEIRNPVVLRTLSQARKVINAIIRQYGSPARVHIETGRELGKSFKERREIQKQQEDNRTKRESAVQKFKELFSDFSSEPKSKDILKFRLYEQQHGKCLYSGKEINIHRLNEKGYVEIDHALPFSRTWDDSFNNKVLVLASENQNKGNQTPYEWLQGKINSERWKNFVALVLGSQCSAAKKQRLLTQVIDDNKFIDRNLNDTRYIARFLSNYIQENLLLVGKNKKNVFTPNGQITALLRSRWGLIKVRENNDRHHALDAIVVACATPSMQQKITRFIRFKEVHPYKIENRYEMVDQESGEIISPHFPEPWAYFRQEVNIRVFDNHPDTVLKEMLPDRPQANHQFVQPLFVSRAPTRKMSGQGHMETIKSAKRLAEGISVLRIPLTQLKPNLLENMVNKEREPALYVGLKARLAEFNQDPAKAFATPFYKQGGQQVKAIRVELVQKSGVLVRQGNGVADNAPGSIVRTDVFIKNNKFFLVPIYTWQVAKGILPNKAIVAHKNEDEWEEMDEGAKFKFSIFPNDLIELRTKTECFLGYYIGPDRHNGSISLREHDSEISKGNAGVYRVGVKLALSLEKYHIDELGKNRRICRPHQRRPVR

SEQ ID NO: 594 - protein, 1056 aa, Pasteurella multocida
MQTTNLSYILGLDLGIASVGWAVVEINENEDPIGLIDVGVRIFERAEVPKTGESLALSRRLARSTRRLIRRRARRLLLAKRFLKREGILSTTDLEKGLPNQAWELRVAGLERRLSAIEWGAVLLHLIKHRGYLSKRKNESQTNNKELGALLSGVAQNHQLLQSDDYRTPAELALKKFAKEEGHIRNQRGAYTHTFNRLDLLAELNLLFAQQHQFGNPHCKEHIQQYMTELLMWQKPALSGEAILKMLGKCTHEKNEFKAAKHTYSAERFVWLTKLNNLRILEDGAERALNEEERQLLINHPYEKSKLTYAQVRKLLGLSEQAIFKHLRYSKENAESATFMELKAWHAIRKALENQGLKDTWQDLAKKPDLLDEIGTAFSLYKTDEDIQQYLTNKVPNSVINALLVFLNFDKFIELALKSLRKILPLMEQGKRYDQACREIYGHHYGEANQKTSQLLPAIPAQEIRNPVVLRTLSQARKVINAIIRQYGSPARVHIETGRELGKSFKERREIQKQQEDNRTKRESAVQKFKELFSDFSSEPKSKDILKFRLYEQQHGKCLYSGKEINIHRLNEKGYVEIDHALPFSRTWDDSFNNKVLVLASENQNKGNQTPYEWLQGKINSERWKNFVALVLGSQCSAAKKQRLLTQVIDDNKFIDRNLNDTRYIARFLSNYIQENLLLVGKNKKNVFTPNGQITALLRSRWGLIKIRENNDRHHALDAIVVACATPSMQQKITRFIRFKEVHPYKIENRYEMVDQESGEIISPHFPEPWAYFRQEVNIRVFDNHPDTVLKEMLPDRPQANHQFVQPLFVSRAPTRKMSGQGHMETIKSAKRLAEGISVLRIPLTQLKPNLLENMVNKEREPALYAGLKARLAEFNQDPAKAFTTPFYKQGGQQVKAIRVEQVQKSGVLVRENNGVADNASIVRTDVFIKNNKFFLVPIYTWQVAKGILPNKAIVAHKNEDEWEEMDEGAKFKFSLFPNDLVELKTKKEYFFGYYIGLDRATGNISLKEHDGEISKGKDGVYRVGVKLALSFEKYQVDELGKNRQICRPQQRQPVR

SEQ ID NO: 595 - protein, 134 aa, Pasteurella multocida
MVNKEREPALYAGLKARLAEFNQDPAKAFTTPFYKQGGQQVKAIRVEQVQKSGVLVRENNGVADNASIVRTDVFIKNNKFFLVPIYTWQVAKGILPNKAIVAHKNEDEWEEMDEGAKFKFSLFPNDLVELKTKK

SEQ ID NO: 596 - protein, 53 aa, Pasteurella multocida
YSKENAESATFMELKAWHAIRKALENQGLKDTWQDLAKKPDLLDEIGTAFSLL

SEQ ID NO: 597 - protein, 1366 aa, Pediococcus acidilactici
MGDRKYNLGLDIGTSSIGFAAVDENNQPIRVKGKTAIGVRLFEEGKTAADRRGFRTTRRRLSRRRWRINLLNEIFDAHLAEVDPTFLARLKESNRSNLDPKKSFQGSLLFPERKDYQFYEEYPTIYHLRKALMEEDRKFDIREIYLAVHHIIKYRGNFLNGTPMRSFKVENIELDTLFDQLNQLYAEIVPDNELAFDLAQVADVKDVLSSTTIYKMDKKKQLVKMMLLPASNKALQSENKKIVTQFVNAILNYKFKLDVLLQVETDADWSLKLNDEGADDKLEEFTGDLDENRLEIIDLLQRLHNWFSLNEITKDGNSLSAAMVEKYENHHHHLGLLKKVIENHPDAKKAKALKETYTAYVGKTDDKTQNQDDFYKAVEKNLDDSPDAKEIKRLIQLDQFMPKQRTGQNGAIPHQLHQQELDQIIEKQSKYYPFLAEPNPNVKRRKDAPYKLDELIAFKIPYYVGPLVTPEEQAQNKENVFAWMKRKAAGPITPWNFDEKVDRMESANRFIRRMTTKDTYLFGEDVLPAESMIYQKFVVLNELNNLKINGRHLSLKDKQDVYNDLFKQQKTVSIKALQNYYVTKKKAATAPTVGGLADPKKFLSSLSTYIDFKNMFGERVNDPQFQEDLEQIVEWSTIFEDRGIFKAKLQALGWLSEKQIQQLVAKRYKGWGRLSKKLLTGLKNAEGYSILDEMWRSTENFMQIQTRPEFAALIQQANEKQFEGNDPNNVWENIESILGDAYTSPQNKKAIRQVVKVVQDIEKAVGNPPEKIAIEFTREAAANPQRTQSRLRTLEKLYESAEEVVDAGLTAELAEFKENKHVLSDKYYLYFTQLGRDVYTGDTISLDKLNDYDVDHILPQSFIKDDSLDNRVLTIRAVNNGKSDNVPAKMFGKKMGSFWRYLLDNGMISKRKYNNLITDPDNISKYAQKGFINRQLVETSQVIKLTANILNGIYDKDTEIIEVPAKMNSQMRKMFDLVKVREVNDYHHAFDAYLTIFIGKYLYKCYPKLRPYFVYGKFKKFGDNEDIEVGDGRFNFLNRIERLKNVTDPETGEILWSNVAPNETIKQIKKVYNYKFMLVSRETTTRRAELFNQTVYPKNYRGKLIPIKEDRPTDLYGGYSGNTDAYLAIVALEDKKKGKYFKVVGIPTRAAAKLEKLKQQDSQQYLQALHKVIAPQFTKSTKKGIKKTEFEIVLDKVHYRQLVQDGPVKMMLGSSTYKYNAKQLVLSEKALQVIADDRKFDETQKDDNLIAVYDEILSIVNQSFDLYDINGFRKKLNDNRDQFIDLPAETKYEGRKVVAHGKREMILEILKGLHANAAFGNLKPIGFSTAFGQLQVPNGIILSKNAILIHQSPSGLFERKIKLSDL

SEQ ID NO: 598 - protein, 1229 aa, Pediococcus acidilactici; identical to SEQ ID NO: 130

SEQ ID NO: 599 - protein, 270 aa, Pediococcus lolii
LFNQTIYSAKASKTMIPIKNDRPTKLYGGYSGNEDAYMSIIRLSDKKKTYKVVGISMRDASKLKAYENNAHEEYLKKLKEVIEQQFLDSGKKTKADFEIVIPKVNYHQRMQDGTKQFRIGSSKYVHNTKQLVLSEKTLKAIRNNKQYNGDAEKDLINAFDEILTIVNDSFSIFDIRSFRKKLNESRDKFVSLPVEDTKEKSKVIKGKRETLKQILIALHANGTSQDIPQLGLKSFGKMVKTGGLTLSENTALIHQSPSGLFEHKIKLSDL

SEQ ID NO: 600 - protein, 1016 aa, Pediococcus lolii
MNGIFDAHLAEVDPTFLARLKESNRSNLDPKKSFQGSLLFPERKDYQFYKEYPTIYHLRKALMEKDRKFDIREIYLAVHHIIKYRGNFLNGTPMRSFKVENIELDTLFDRLNQLYEEIIPDNELAFDLEQVADVKEVLSSTTIYKMDKKKQLVKMMLLPASNKALQSENKKIVTQFVNAILNYKFKLDVLLQVETDADWSLKLNDEGADDKLEEFTGDLDENRLEIIDLLQRLHNWFSLNEITKDGNSLSAAMVEKYKDHRHHLELLKKVIEDHSDAKKAKALKETYTAYVGKTDDKTQNKDDFYKAVEKNLDDSPEAKEIKRLIQLDQFMPKQRTGQNGAIPHQLHQQELDQIIEKQSKYYPFLAEPNPNVKRRKDAPYKLDELIAFKIPYYVGPLVTPEEQAQNKENVFAWMKRKAAGPITPWNFDEKVDRMESANRFIRRMTTKDTYLFGEDVLPAESMIYEKFVVLNELNNLKINGRHLSLKDKQDIYNDLFKQQKTVSIKALQNYYVTKKKAATAPTVGGLADPKKFLSSLSTYIDFKNMFGERVNDPQFQEDLEQIVEWSTIFEDRGIFKAKLQALGWLSEKQIQQLVAKRYKGWGRLSKKLLTGLKNAEGYSILDEMWHSTENFMQIQTRPEFAALIQQANEKQFEGNDPDNVWENIENILGDAYTSPQNKKAIRQVVKVVQDIEKAVGNPPEKIAIEFTREAAANPQRTQSRLRTLEKLYESAEEVVDAGLTAELAEFKENKHVLSDKYYLYFTQLGRDVYTGDTISLDRLNDYDVDHILPQSFIKDDSLDNRVLTIRAVNNGKSDNVPAKMFGKKMGSFWRYLLDNGMISKRKYNNLITDPDNISKYAQKGFINRQLVETSQVIKLTANILNGIYDKDTEIIEVPAKMNSQMRKMFDLVKVREVNDYHHAFDAYLTIFIGNYLYKCYPKLRPYFVYDNFKKFGNKEDIGHKRFNFLGKIERDKKVVAPETGEILWSNVAPNETIKQIKKVYDYKFMLTSHETYTKHG

SEQ ID NO: 601 - protein, 1333 aa, Planococcus antarcticus
MKNYTIGLDIGVASVGWVCIDENYKILNYNNRHAFGVHEFESAESAAGRRLKRGMRRRYNRRKKRLQLLQSLFDSYITDSGFFSKTDSQHFWKNNNEFENRSLTEVLSSLRISSRKYPTIYHLRSDLIESNKKMDLRLVYLALHNLVKYRGHFLQEGNWSEAASAEGMDDQLLELVTRYAELENLSPLDLSESQWKAAETLLLNRNLTKTDQSKELTAMFGKEYEPFCKLVAGLGVSLHQLFPSSEQALAYKETKTKVQLSNENVEEVMELLLEEESALLEAVQPFYQQVVLYELLKGETYVAKAKVSAFKQYQKDMASLKNLLDKTFGEKVYRSYFISDKNSQREYQKSHKVEVLCKLDQFNKEAKFAETFYKDLKKLLEDKSKTSIGTTEKDEMLRIIKAIDSNQFLQKQKGIQNAAIPHQNSLYEAEKILRNQQAHYPFITTEWIEKVKQILAFRIPYYIGPLVKDTTQSPFSWVERKGDAPITPWNFDEQIDKAASAEAFISRMRKTCTYLKGQEVLPKSSLTYERFEVLNELNGIQLRTTGAESDFRHRLSYEMKCWIIDNVFKQYKTVSTKRLLQELKKSPYADELYDEHTGEIKEVFGTQKENAFATSLSGYISMKSILGAVVDDNPAMTEELIYWIAVFEDREILHLKIQEKYPSITDVQRQKLALVKLPGWGRFSRLLIDGLPLDEQGQSVLDHMEQYSSVFMEVLKNKGFGLEKKIQKMNQHQVDGTKKIRYEDIEELAGSPALKRGIWRSVKIVEELVSIFGEPANIVLEVAREDGEKKRTKSRKDQWEELTKTTLKNDPDLKSFIGEIKSQGDQRFNEQRFWLYVTQQGKCLYTGKALDIQNLSMYEVDHILPQNFVKDDSLDNLALVMPEANQRKNQVGQNKMPLEIIEANQQYAMRTLWERLHELKLISSGKLGRLKKPSFDEVDKDKFIARQLVETRQIIKHVRDLLDERFSKSDIHLVKAGIVSKFRRFSEIPKIRDYNNKHHAMDALFAAALIQSILGKYGKNFLAFDLSKKDRQKQWRSVKGSNKEFFLFKNFGNLRLQSPVTGEEVSGVEYMKHVYFELPWQTTKMTQTGDGMFYKESIFSPKVKQAKYVSPKTEKFVHDEVKNHSICLVEFTFMKKEKEVQETKFIDLKVIEHHQFLKEPESQLAKFLAEKETNSPIIHARIIRTIPKYQKIWIEHFPYYFISTRELHNARQFEISYELMEKVKQLSERSSVEELKIVFGLLIDQMNDNYPIYTKSSIQDRVQKFVDTQLYDFKSFEIGFEELKKAVAANAQRSDTFGSRISKKPKPEEVAIGYESITGLKYRKPRSVVGTKR

SEQ ID NO: 602 - protein, 211 aa, Porphyromonas catoniae
MGKKVLGLDLGVGSIGWCLITLDKDEKPQSILGMGSRIVPLSADDATEFTQGKAITKNKMRTVARTIRKGMDRYQLRREALKKVLREHAMLPDEALIKLPLLELWELRARAATPGEQVSLTELGRVLLHINQKRGYKHAKADEAAEAETKKGKETGYVAQVKGRYQILKEKGLTIGQHFAGELRANQQTAPRGTYYTYRIKEQVYPRVRGV

SEQ ID NO: 603 - protein, 1009 aa, Porphyromonas catoniae
MRIIREAYIEEYDRIMAVQRVFYPELLTDALIGRIRDRIIFYQRPLKSCKQLVSFCEFEKKEKVIRVKHTNKEGVQELVEKTITIGPKVAPKSSPIFQVCKVWESIHNIRLYHPDGTERKLEQEEKQKLFDYLQRNDKLSLTTLRKELKIKPKDKLWCDKLLEKGIAGNTTAAILRKAFKGYEHYERLFRFDLVRRDSHEADEDGVIRPIIDESYQNEPLYKLWHILYSIEDRAEMRSALIGQLGIKAEDLDNGLMDALYKIDFVKQGYGNKSAKFICKLLPHLQEGKMYSEAAEAAGMRHSDSMTAQERDERNLLEEIPLLQKNALRQPVVEKVLNQMINLVNALKREHGEIDEVRVELARELKMSREEREKATKNNSSREKENKAIAERITEYGLTPTKSRIQKYRLWQESAESCIYCGKRVDVVQFLRGEETEVEHIIPKSILFDDSLSNKACACRSCNQEKGNRFAMEYIQAKGWEQDYIERVDSLFHDKKISYSKRQHLLMLPKDLPEDFIERHLRLSQYISREAQGILRKGIRLVSASEGGVTAKLRQLWGYDNILRDLNLERYKSMGETEVVTVEHRDGQRTDERIKDWSKRKDHRHHAIDALVVACTRQSYIQRLNRVNAEADRQEMDAFIKEQQQEHKLSKKEKLSLLENWLKEQPHFTTGEVKEHAEGILISFRPGKRTVSRGRNIYKRSGKTDVQRNVLIPRGALSEETVYGVISVDGENKVVCKYPLQKFLDTKETNVDKIADQAAEKIVDKVLREKIRERIKRYGKKEAFAEPLYLDEAQTQVVRSVRCFISKDQAKLIPLRYNDESEAVGFVAPGNNHHLALYRDASGKMRASVVSFFAAVERARYGIPMIVLNPRETREKARIIPDLPESIFSKLPEEDWVLEETLQEGEMVLLGMENDAIEEAIKKKDYSKLSRYLYRVQSLSYNDYKFCFHLETESEKKEKKKGEDKKRGEKAKNTAVMPPKRYRIRCLATYQEDLNPRKVKIDLLGRISLA

SEQ ID NO: 604 - protein, 1197 aa, Porphyromonas sp.
MLMSKHVLGLDLGVGSIGWCLIALDAQGDPAEILGMGSRVVPLNNATKAIEAFNAGAAFTASQERTARRTMRRGFARYQLRRYRLRRELEKVGMLPDAALIQLPLLELWELRERAATAGRRLTLPELGRVLCHINQKRGYRHVKSDAAAIVGDEGEKKKDSNSAYLAGIRANDEKLQAEHKTVGQYFAEQLRQNQSESPTGGISYRIKDQIFSRQCYIDEYDQIMAVQRVHYPDILTDEFIRMLRDEVIFMQRPLKSCKHLVSLCEFEKQERVMRVQQDDGKGGWQLVERRVKFGPKVAPKSSPLFQLCCIYEAVNNIRLTRPNGSPCDITPEERAKIVAHLQSSASLSFAALKKLLKEKALIADQLTSKSGLKGNSTRVALASALQPYPQYHHLLDMELETRMMTVQLTDEETGEVTEREVAVVTDSYVRKPLYRLWHILYSIEEREAMRRALITQLGMKEEDLDGGLLDQLYRLDFVKPGYGNKSAKFICKLLPQLQQGLGYSEACAAVGYRHSNSPTSEEITERTLLEKIPLLQRNELRQPLVEKILNQMINLVNALKAEYGIDEVRVELARELKMSREERERMARNNKDREERNKGVAAKIRECGLYPTKPRIQKYMLWKEAGRQCLYCGRSIEEEQCLREGGMEVEHIIPKSVLYDDSYGNKTCACRRCNKEKGNRTALEYIRAKGREAEYMKRINDLLKEKKISYSKHQRLRWLKEDIPSDFLERQLRLTQYISRQAMAILQQGIRRVSASEGGVTARLRSLWGYGKILHTLNLDRYDSMGETERVSREGEATEELHITNWSKRMDHRHHAIDALVVACTRQSYIQRLNRLSSEFGREDKKKEDQEAQEQQATETGRLSNLERWLTQRPHFSVRTVSDKVAEILISYRPGQRVVTRGRNIYRKKMADGREVSCVQRGVLVPRGELMEASFYGKILSQGRVRIVKRYPLHDLKGEVVDPHLRELITTYNQELKSREKGAPIPPLCLDKDKKQEVRSVRCYAKTLSLDKAIPMCFDEKGEPTAFVKSASNHHLALYRTPKGKLVESIVTFWDAVDRARYGIPLVITHPREVMEQVLQRGDIPEQVLSLLPPSDWVFVDSLQQDEMVVIGLSDEELQRALEAQNYRKISEHLYRVQKMSSSYYVFRYHLETSVADDKNTSGRIPKFHRVQSLKAYEERNIRKVRVDLLGRISLL

SEQ ID NO: 605 - protein, 1422 aa, Prevotella denticola
MTQKVLGLDLGTNSIGSSVRNLDLSDDLKGQLEFFSSDIFRSSVNKESNGREYSLAAQRSAHSRSRGLNEARRRKLWATLDLLIKYGFCPMSPESLMRWRTYDKQRGLFREYPIDDKNFNAWILLDFDGDGKPDYSSPYQLRRELVIRQFDFDQPIERYKLGRALYHIAQHRGFKSSKGETLSQQETNSKQSLTDDTADVAGEMKASEEKLSKGLSTYMKENNLLTVGAAFAQLEDEGVRVRNNNDYRAIRSQFQREIETIFKFQQGLSVENELYERLVSEKKNIGTIFYKRPLRSQRGNVGKCTLERTKPRCAIGHPLFEKFRAWTLINNIKVRMSEEEQAEQLPMKLRFELYNDCFLAFVRAEFKFEDIRKYLEKRLGVHFSYNDKTINYKDSTSVAGCPITARFRKLLGEDWESFHVDGQKQRQAHGKNNASFHTVSYSTNDIWHFCYDAEEPEAVLSFAQDNLKWEKKKAEELVRIWSAIPQGYAMLSQKAIRNINKMLILGLKYSDAVLLAKVPEIVEITDGEILSVTEDYHRVEAQVGYEKQINNIVNALIAKYKSASEEYRFADHNYEYQLDKSDEKDIIKQIESNIGTRKWSLLDADEQTDILQKVRDKYQNFFRSHERKFVESPKLGECFEEYLMKKFPMVEGERWKKLYHPSQIAIYRPVPANKDRSALRLGNPDIGAIKNPTVLRVLNTLRKRVNQLLDDGIISPDETRVVVETARELNDANRKWALDTYNRIRHDENEKIKKILAEFYPKRDNISTVDIDKARYVIDQREMDYFTEAKTYHKDIKKYKLWLEQGGQCMYTGRTINLSNLFDPNSFDVEHTIPESISFDSSDMNLTLCDAHYNRFIKKNHIPADLPNYDKSVVIDGKEYSPIKPRLQRWADRVERLNRNVEYWRGQARRAQNKDRKDQCMREMHLWKMELEYWTKKLERFTITEVTDEFKNSQLVDTRVITRHAVLYLKSIFPHVDVQRGDVTAKFRKILGIQSVDEKKDRSLHSHHAIDATTLTIIPGAAKRERMLELFAKIEEVNKMLSFSGNEDRTGLKQELDGLKNQLNKEVKACRIGHNVSEIGTFINDNIIINHHVKNQALTPVRRRLRKRGHIVGGMDNPRWQTGDALRGEIHKASYYGAITQYAKDKEGKVLMKEGRPQINPTIKFVIRRELKYKKSSTDSGFASWDDLGKAIVDKELFALMKGQFPEGTSFKDACEQGIYMIKKGKNGEVDTKLYRIRHIRCKTKQKNALKIKEQAYKSEKEYKRYFYAAVGDLYAMCCYTNGKTREFKIYSLYDISCHRKVGVEDIPEFITDKKGNRLMLDYKLHTGDMILLYKENPEELYDLDNVSLSKLLYKINGFENDGLRIRMVNHLVAKEAMGESVKDYAKLPDIIRCGVKTIKFLVMGENRDFVIKNGKISFNHR

SEQ ID NO: 606 - protein, 443 aa, Prevotella disiens
MELDYWKGKYNRFTMTEIPEGFSRRQGMGIGLISRYAGLYLKTIFHKKDNPQKSNVYIVKGSITAEFRRIWNIQDDYEKKCRDNHIHHCIDAIVVGCIGKREYDLMAQFYRDEEKYRWEKKKKPFFKKPWETFTQDMLSLKDEVLTVHFNPSNFTKKAHKKVFTPKGIFVAQGDCARVKLHKESYFGAIEQKGEIKYVMRKELSALKIEDIKNIVDAVVKEKVLAVVKKKGFKQAMAEPIYMNEDKRILIKKVRLFVSQTNPLIVKKHRDLSSKEYKQNYYVDNEGNLMIAMYEGVKKNGKIDREITVVNNLEAAKFFRQSQKNNAEKQLISHLSPKNGYPLKTVLTQKQLVLMYEDSPKEIKLRDTKNMVKRLYQVVEIEKDGRVKLKFHQEARSEGLNKNSAAFKIQDTPESLYRHTKSNLKVLVNGVDFKINILGEISLI

SEQ ID NO: 607 - protein, 1375 aa, Prevotella histicola
MKKILGLDLGTTSIGWALVYESENTDEKSSIVRLGVRVNPLSVDEKGNFEKGKAITTNADRQQTHGARINLQRYKLRRENLKDCLQKQGWIGTEALCEEGKTSTFETYMLRAKAAEEEISLHELCRVLFMMNKKRGYKSNRKANNKEDGKLFDGMTVAKKLYEEHLTPAEYSFQLLSSGKKFKQEYYRSDLKEEFDRIWNEQQKYYPEILTDDFKQQLQGKSKGNTSKIFLGKYGIYSADLKGLDRKLQPLKWRVEALKQQVDKEVLAFVISDLNGQIASTSGLLGAISDRSKELYFNKQTVGQYLWTSLKETPHVSIKNKPFYRQDYLDEFEKIWETQATYHKELTPELKQEIRDIIIFYQRPLKSKKGLISVCELEQRKVKVTIDGKEKEISIGPKVAPKSSPMFQEFRIWQNLNNILLIDKGNNSIHPLYEEEKNLLYEELSVKEKLSKAEALKVLNKNSKQWDLNYKEIEGNRTQAVLYDCYNRIIVMTGHEEYNFKKLKASEIRSYVKTTFTGLGFNTDILEFDSSLTGHELEKQPMYQLWHLLYSYESDNSRTGNDALLRKLETAFGFPKEYAAVLSDVVFEDSYGNLSVKAMRKILPHLQAGLNYSQACEEAGYKHSRRSLTKNELDQKEYKEKLELLPKNSLHNPVVEKILNQMINVINAVIDEYGKPDEIRIELARELKIGAAERENMTRSINQGNAENKRIREILEKEFALSYISRNDIIKYKLYEELKSNGFKTLYSDTYISKDKLFSKDFDIEHIIPKARLFDDSLSNKTIEARDVNIAKSNKTAFDFISEKYDQQGIEAYKKKLDILLQDGSISKAKYNRLLMKEADIPSGFIDRDLRDTQYIAKKAYEILSDLVRNVTPTTGAVTSRLREDWQLVDVMKELNFEKYQKLGLVEVIEDRDGRKIKRIKDWTKRNDHRHHAMDALTIAFTKPSYIQYLNNLNARSDKNSSIYGIENKELHREDNKLRFNAPLPINEFRAEARRHLKSILVSVKAKNKVMTQNVNVIKTKHGVIKKVQLTPRGELHNATFYGTKKRPIIKMVKVGAALDEVTIKKVSSSFIREALLDRLHEYNGDAKKAFTGRNSIDKNPIYIDEEHKKTVPALVKTIEWEMYHPTRKLISPDLKIDKVIDKGIREILKTRLAKFNGDAQKAFSNLDENPIYKDEAKKITLKRVSLEGVSSVIPLHTLKDREGKLVVGKDGKPVLGDYVQTSNNHHIAFYMDENGNLQDNVVSFFEAAERKSQGVPVIDKNYNHDKGWNFLFTMKQNEYFVFPNEVTGFNPSEVDLMDEANYSIISPNLYRVQKMSKASGRDYWFRHHLEAMLNDDPKLRNSMFKRITSLKALEGIVKVRINCIGKIVAVGEYD

SEQ ID NO: 608 - protein, 1380 aa, Prevotella intermedia
MKRILGLDLGTTSIGWALVNEAENNNEASSIVRLGVRVNPLTVDEKSNFEKGKAITTNADRQLRHGARINLQRYKLRRQNLHDCLQKQGWLGTEAMYEEGKASTFETYKLRAKAAEEEISLHEFARVLFMLNKKRGYKSNRKANNKEDGQLFDGMTIAKKLYEEHLTPAEYSLQLLNKGKKFTQGYYRSDLNAELERIWDEQKKYYPEILTDEFKQQLEGKTKTNTSKIFLAKYGIYSADLKGLDRKFQPLKWRVEALQQQVDKEVLAFVISDLKGQIANTSGLLGAISDRSKELYFNKQTVGQYLWASLEENPHISIKNKPFYRQDYLDEFEKIWETQAAFHKQLTPELKQEIRDIIIFYQRPLKSKKSLISVCELEQRKVKATIDGKEKEITIGPKVAPKSSPVFQEFRIWQNLNNVLLIDNDTNEKRPLDEVERNLLYKELSIKAKLSKTEALKILNKKGKQWDLNYRELEGNRTQAILFDCYNRIITLTGHEECDFKKIKASEIRHYVSTIFKNLGFSTEILDFDPSLKKHELEKQPMYQLWHLLYSYESDNSRTGNESLLRKLETTFGFPEEYATVLCDVVFEEDYGNLSVKAMREILPYLQAGNDYSQACAYAGYNHSRHSLTKEELDQKVYKERLELLPKNSLRNPVVEKILNQMINVINAIIDEYGKPDEIRIEMARELKSSAADRKKTTHAISQGNAENQRIREILEKEFSLSYISRNDIIKYKLYEELEPNYYKTLYSDTYITKDKLFSKDFDIEHIIPKARLFDDSFSNKTLEARNINLEKSNKTAFDFIKEKYGEDGAEAYKKKLDMLLENDAISRPKYNNLLRAEADIPSDFINRDLRNTQYIAKKACEILGELVKTVTPTTGKITNRLREDWQLVDVMKELNFEKYEKLGLTEIVEDRDGRKIKRIKDWTKRNDHRHHAMDALAIAFTKPSFIQYLNNLNARSNKGDSIYAIENKELHYEEGKLRFNAPIPVNEFRAEAKRHLSAILVSIKAKNKVMTQNVNKIKTKHGIIKKIQLTPRGPLHNETIYGTKMRPIIKMVKVGAALDEATINKVSSPAIREALLKRLNEYSGNAKKAFTGKNTLEKNPIYLNAGRTKTVPSLVKTVEWESFHPTRKLIDKDLNVDKVVDKGIREILKARLEEFNGDAKKAFSNLEENPIYLDEAKKIALKRVSIEGVLSAIPLHTLKNQAGKPITGKDGKPVLGNYVQTSNNHHIAFYYDEDGNLQDNAVSFFEAAERKSQGIPVIDKDYNRDKGWRFLFTMKQNEYFVFPNEATGFIPSEVDLTDEANYGIISPNLYRVQKVSRIDKGTSASRDYWFRHHLETILNDDAKLKNLAFKRIRGLLELKDIIKVRINSTGKIVAVGEYD

SEQ ID NO: 609 - protein, 129 aa, Prevotella multiformis
MQKGGTGCKINRQTVGNVEVNVLNLRLYDRTDDREVTAGYLPTKEDYVRLFVYLNDRKEINQDTLLKDYFRLKKVKCGNEKEFAIRWNYIEDKEKKYPCNETRHELLAALDRAGMEHGWLDDSGTSARW

SEQ ID NO: 610 - protein, 535 aa, Prevotella multiformis
MVKGLLSNIVRTAEEREETSKFVISCTGRITDRLKQDWGLNDVWNSLVYTRFKRLNELTETEAFGHWQDKDRRVFQTSVPLELQRGFSKKRIDHRHHAMDALVIACASRNIIGYLNNESAESPEKREDLRRKLCDKNHIIRKPWESFTQDARAALEDIVVSFKNYVRIINKATNYYERYDADGRKTKAEQKGGEMWAVRKPMHEATYYGKVNLRRKERVSLKAALEDIPSICNRDLRDYINGLVEKHFNKEQVLAQFRSVGNRWNKQHIDKVDVWRFSDGKEEMVATRKPLDTSFDAKRIEAVTDTGIQRILSNYLEAKGGDPKIAFTPEGIADMNQHITAYNNGKQHKPILKVRVSTKLGKKYPVGQTGCKAGQFVVAEAGTNLYFAVYEDGEGNRSYDTIPLNEAVECLKQGLPPVPETREKGDRLKFYLSPNDLVYVPAGDEENEIDRERIYKFVDSSGTTANFIPHRTAGLIYNVDKKLAEALCNGSIIQNEYGVGSQQSKNQKALTGEMVKAVCWKLEVDRLGNILRIIK

SEQ ID NO: 611 - protein, 1380 aa, Prevotella nigrescens
MKRILGLDLGTTSIGWALVNEAESNNEASSIVRLGVRVNPLTVDEKSNFEKGKAITTNADRQLRHGARINLQRYKLRRQNLHDCLQKQGWLGTEAMYEEGKASTFETYKLRAKAAEEEISLHEFARVLFMLNKKRGYKSNRKANNKEDGQLFDGMTIAKKLYEEHLTPAEYSLQLLNKGKKFTQGYYRSDLNAELERIWDEQKKYYPEILTDEFKQQLEGKTKTNTSKIFLAKYGIYSADLKGLDRKLQPLKWRVEALKQQVDKEVLAFVISDLKGQIANTSGLLGAISDRSKELYFNKQTVGQYLWASLEENPHISIKNKPFYRQDYLDEFEKIWETQATFHKQLTPELKQEIRDIIIFYQRPLKSKKSLISVCELEQRKVKATIDGKEKEITIGPKVAPKSSPVFQEFRIWQNLNNVLLIDNDTNEKRPLDEDERYLLYKELSIKAKLSKTEALKILNKKGKQWDLNYKELEGNRTQAILFDCYNRIITLTGHEECDFKKIKASEIRHYVSTIFKNLGFSTEILDFDPSLEKHELEKQPMYQLWHLLYSYESDNSRTGNESLLRKLETTFGFPEEYATVLCDVVFEEDYGNLSVKAMRKILPYLQAGNDYSQACAYAGYNHSRHSLTKEELDQKVYKERLELLPKNSLRNPVVEKILNQMINVINAIIDEYGKPDEIRIEMARELKSSAADRKKTTHAINQGNDENQCIREILEKEFALSYISRNDIIKYKLYEELKPNGFKTLYSDTYIPKDKLFSKDFDIEHIIPKARLFDDSYSNKTLEARDINLAKSNKTAFDFVKEKYGEQGAEAYKKKLDMLLGNNVISKPKYNKLLMTEADIPSDFINRDLRNTQYIARKACEILGELVRTVTPTTGKITNRLREDWQLVDVMKELNFEKYEKLGLTEIVEDRDGRKIKRIKDWTKRNDHRHHAMDALAIAFTKPSYIQYLNNLNARSNKGDSIYAIENKELHYEEGKLRFNAPIPVNVFRAEAKRHLSAILVSIKAKNKVMTQNVNKIKTKHGIIKKIQLTPRGPLHNETIYGTKMRPIIKKVKVGAALDEATINKVSSPAIREVLLKRLNEYSGNAKKAFTGKNTLDKNPIYLNAERTKTVPASVKTVEWENYHPIRKPITPDLKVDKVIDKGIGEILKARLEEFNGDAKKAFSNLEENPIYLDQTKKIALKRVSIEGVLSTIPLHTLKNQAGKPIMGKDGKPVLGNYVQTSNNHHIAFYYDEDGNLQDNAVSFFEAAERKSQGISVIDKDYNRDKGWRFLFTMKQNEYFVFPNEATGFIPSEVDLTDEANYGIISPNLYRVQKMSRIEKGTSVSRDYWFRHHLETILNDDSRLKNSAFKRINSLKPLEGIIKVRINSIGKIVAVGEYD

SEQ ID NO: 612 - protein, 1506 aa, Prevotella nigrescens
MKTILGLDLGPNSIGWAKVEVDDEGNYLRNIKLGSRIIPMTQDMLGDFDKGVKVSQTAIRTDFRGNRRLIERHLLRRERLHRVLHALKFLPKHYEDAIGWDRNEPATYGKFVNNSEPKLAWERQEDGSMRFLFMESFNEMVADFAQNQPSLVSDGKKIPLDWTIYYLRKKALTRPIKKEELAWILLNFNQKRGYYQLRGEEEEDNLTKRKEYYKLKVVGVEADGAPKGGKTWYNIHLENGWTARCQSKIPLDDWVGKVKEYIVTTEYEDDGKTPKCDKEGKVKRSFKSPEKDDWQLIKTRTEKFIDDSNKTVGAFIYDYLLEKPFDKIRGKYIRTIERKYYKNELREILREQTKYHEGLHSLEALKICAEELYKNNQQHQEYLLKKDMTFLLLNDLIFYQRPLKSKKSLIADCPYEVYKYDDKLTGKKGQKKIKCIAKSNPYYQEFRLWQFIANLRLFSVTDGKEVTAEYLKTEEDYVRLFSFLNDRKDIKQETFLRSFLKLKKESIGSEKIYPIRWNYIEDANKSYPCNATRHELLLAFDRADIPRELLDVEEREYRLWHLLYSIEAKEETESALRKLKANKAFGDLNIDDAFVNSFLKIKPFEKEYGAYSEKAIKKLLAVMRRGSLWKEADICEATKQNIAKILQNDIDEKLKKKIEAAVSSFNKLSDFQGLPTWLACYVVYGRHSEAAQIQCWQSPEDLKTYINKFKQHSLRNPIVEQCLLETLRTVYDIWKDAGQIDEIHIELGRNMKSTAEQRARKTKDILRNENTNLRIKNLLVELKNDDKIENVRPYSPSQQEILRIYEEGALQELSKEDEMFEDISKISKMAQPSPTELSRYKLWLEQKYRSPYTGRVIPLSKLFTTAYQIEHIIPQSRYFDDSFNNKVICESEVNSLKDNMLGYEFIKECGGRIVHCTLLGDVKIFTKEEYKDFVTKHYIDNTYKRDKLLLEDIPQEFSARQLNDSRYISKMVQTVLSNIVRAENEQEATSKFVVSCNGAITNRLKKDWGLNDVWSSIVCPRFKRLNEITKTNAFGHWEDKAGKHVFQTTVPLELQRGFSKKRIDHRHHAMDALVIACASRNIVNYLNNESANSPEKREDLRKKLCDEKRKIRKPWKTFTQDAREALSDVVVSFKNYVRVINKATNYYEHYSSSGNKVMISQKGNDMWAIRKPLHKESVFGRVNLCRKVIVSLKKALENIPAICDKTLRDYINALVEKHFNTRQLLAHFKSINYRLNRQCVEKVEVWQFSDEKIEMVARRKSLDTSFDDKQISSITDTGIQKILLNYLQTKDGNAEIAFTPEGIEEMNKNISLYNDGKAHQPILKVRVATPKGMKYPVGQTGNKATKFVVAEKGTNLYFAIYENELGVRSYDTIPLNIVVERLKEGLSPVPQANEADIPLKFYLSPNDLVYVPTKENEDELCRDRIYKFVDSSGTTANFVPHTSANTIYNVDKEYAEKCCNGAVFLNEYGLGSPQSKNQRALTGEMIKEICWKLKVDRLGNIIKVIK

SEQ ID NO: 613 - protein, 774 aa, Prevotella oulorum
MEQCILETLRTVYDIWKEAGQIDEIHVELGREMKQTAEQRAHLTEKVLRNENTNLRIKSLLMELKNDADMKDVRPYSPMQQEILRIYEEGALQTLSKDDAAFTEIMKISKMAQPSASELQRYRLWLEQKYRSPYTGKPISLSKLFTSAYQIEHIIPKKRYFDDSFSNKVICEAEVNGKKDSMLAYEFIKDCGGDVIHCTTLGDVTILSEAEYKALVTELYANNKSKKDKLLMEDIPQDFINRQLNDSRYISRVVMTLLSNIVRIEGEEEATSKFVIPCSGGITDKLKKDWGLNDVWNNIVYPRFERLNALTNTSDFGQWENKEGKRVFQTSVPLELQRGYQKKRIDHRHHAMDALVIACASRKIINYLNNQEANDPTKQENARKQLCIKSRIIRKPWETFTQDAYKALDNIVVSFKNYVRVINKATNYYERYNADGKKAVDEQKGEAMWAIRKPMHKDTVFGHVNLRRKAVVKLKDALENIPAICDKTLRHYIQDLQKKHFNTKQLLAHFKSINYRLNKQAVDKVEVWQYSDDKEQLAATRKPLGPSFDAKCIAAITDTGIQKILLNYLQAKGGDPAIAFTPEGIAEMNQNIAVYNGGKQHQPILKVRIAKPMGKKFPIGQTGNKAFQYVIAEEGTNLYFAIYEDEEGNRTYDTIALREVVERLKQGLTPVPEKNEKGVALKFHLSPNDLVYVPTADELLSKVCSLDKNRIYKMVSATKSECLFIPHSVAKTIYDKVEFEALNKMGRALTGEMIKSVCWKIEVDRLGHIVNIIK

SEQ ID NO: 614 - protein, 691 aa, Prevotella oulorum
MKTILGLDLGTNSIGWAKVIVDDNENYLRDIQLGSRIIPMSQDVLGKFDKGVTESQTAIRTSFRGVRRLRERTLQRRERLHRVLHTLHYLPPHYDSAIGWDRKTPTTYGKFLNHGEPKLAWERREDGTMQFLFMDAFHEMIADFAKYQPALVADGKKVPLDWTIYYLRKKALTQPIKKEELAWILLNFNQKRGYYQLRGEEDEENAAKHEEYHELKVVGVEVDEAGKGDNTWYNVKLENGWTYHRQSKIPLDDWVGKVRAFIVTTEYEKDGTTPKKDKEGNVKRSFRSPDEKDWGLRKKQTEHSLEASGTPVGAFIYDHLLKEPSDKIRGKFIHTIERKYYKQELAAILREQSKHHEKLCSKDMLKACIEELYPNNPLHRESLLKKDMPYLLIEDLIFYQRPLKSKKSLIAECPYEAYSYVDKETGEMKRQGIKCIAKSNPYYQEFRLWQLIANLRLRNRSDERDVTAEYLPHQEDYVRLFTYLNDRKEINQETLLKDFFKLKKVTIGGEKVFPIRWDYIEDKEKKYPCNATRHELLLALDRAGIEHDWLNDRDLAYRLWHLLYSVDSKDETERALRKLKDDDAFVESFLKIKPFEKEYGAYSEKAIKKLLPVMRRGSLWNEADLCPSTKERIANILQGTIDEKLKKKIGAFISSCQQVSDFQGLPEWLACYVVYGRHSEATDIQRWETPE

SEQ ID NO: 615 - protein, 242 aa, Prevotella saccharolytica
MKLVLGLDLGVGSVGWALIFITDSGEPIKILALGERIVSMDSNNSNEFSAGATCTLNQKKTKAKSVRKGYSRYVQRRDALTAELRHIGMMPDETLIKLPVLDLWQLRANAATEGKKLSLAEIGRVLYHINQRRGYKHGKSDVSSDNKQKGYVKAVNERYCMIQERQQTIGQYFALKLKETAVTTEKGTFYTFRIKDQVFPREAYEEEFVVAYSTKVLKFKQITTLLNVVICLMMLLLIVQRY

SEQ ID NO: 616 - protein, 1174 aa, Prevotella sp.
MEFHPELCDAELLKACAEELYRNNEAHRAQLLAKDFKHLLVEDVLFYQRPLKSKKSLIANCPYETRQYINKETGEIKDVNVKCIAKSNPYFQEFRLWQWISNLRLLRQADGQDVTAAYIKGNEDKERLFDLLNNQGEIKQEHILRDFLKLKKPKGGEFPLRWNYVDDKIYPANETRHAINKAIKGMAVDKEEKETLGQLLDQPAVAYMLWNLLYSITDRNELARALRRFALTHGVSSVDAFVESFLKVKPFKKEYGAYSEKATKKLLQVMRLGKYWCGDELPEPAKRTKGNKQAVYDEMAHRGICKQTLQNISNIIEENIDERLMGALLNPERPLTELSHFQGLSVSDACYVVYGRHSEVAEIVKWKDADELNTFINNFKQHSMRNPIVEQCVLETLRTVRDVWEQEGQIDEIHVELGRNMKRTAEQRARDTQAIQRNENTNMRISLLLTELKNDPSISDVRPYSPSQRELLKIYEEGALENLTNQDEDIAKISRLAQPSASELRRYKLWLDQKYVSPYTGRPIPLAKLFTPAYEIEHIIPQSRYFDNSFSNKVICEAEVNKLKDNLLGMEFIKKFGGKTKGILDEEAYKLHVTTNYAHNPAKRSKLLMEDLPTDFNSRQLNDTRYISKTVMALLSNVVREEGERETRSKHVVVCTGGVTDTLKKDWGLHDVWHNLVYPRFIRLNNLTGSQNFGYWRYLNEENSKKGEDSKKVFQITLPPECQRGFVKKRIDHRHHAMDALVIACASANIVNYLNNQSAANPHIHENLQRLLCDRKREIRKPWPTFTQDAQAALKDLVVSFKNTVRVVNKASNTYLRYDKDGKKKRFKQEGEGLKAIRKPMHKETYYGEVNLIRKEMVPLKRALDDVNAIVDKELRASIKGLLRDGFNPQQVLANFKAKDFKFDKRDIKKVEVYVSSEKSTPMVATRKSLDTSFNAKRIADITDTGIQKILLNYLKANDNSPEQAFTPEGIAYLNEHIAEYNDGKPHQPILKVRVSEVKGAKFAVGQTGSKKDKFVEAQSGTNLYFAIYEDKEGKRHFETIALKVAAERLKDKQMPVPEINDAGLPLKFYLSPNDLVYVPTDEDRATAHPSIDKMRIYKMVSATDRQCFFLPFTVASVISNKVEFEALNKMERVLDASEYSSAYDSSHVNKVMVKNVCWKLEVDRLGNITKIVR

SEQ ID NO: 617 - protein, 992 aa, Prevotella sp.
MITRILGLDTGTNSLAWAVVDRDANGNYTLVKRGDVIFTEGVKIEKGIESSKAAERTAHKALRVHYSRRRLHKIDTLKVLVELNLCPCLSDEQLSQWKAKKTYPLTDDFMLWQRSGSAEENNPYYCRHRCLTQKLDLTDQSQRFLLGRAFYHLAQRRGFLSNRLDTSADSDESGKVKSGIAQLSVEMEKAGCEFLGEYFYQLYKQHGNTIKLRSRYTDREEHYKKEFLAICEKQELDPKWVEALQRAIYFQRPLKSQRKGVGKCTFEPKKPRCAESHPDYEAFRMLCFLNNVKIQTPNDTSLRPLNEDEREKIWPIFFRKSKPNFDFEDIAKALAGKNNYAWYKDAGEKPFKFNYRMQQGVSGCPVTAQLIDIFGSDWQTAIAETYTAVEKKNGTKTIDEMADDVWNVLYSFSSKDKLKAFATEKLQLDEASATKFANAKLPHGFASLSLKAIRNILPFLRQGFIYAHAVHLAKIPDIVTKAVWNDADKREMILSGLMEIIENYNPKDRGVEGTIDFCIKSHLQDVIDLRPGAADALYHPSMIETYPDAKLNKMGVFQLGSPRTNAIRNPMAMRSLHILRSVVNQLLRDGIIDRDTEVHVEYARELNDANKRKAIADYQREQEKKRKQYRDDIIALYKSECHKEIEPTDTDILKFQLWEEQNHLCLYTGTQIGICDFLGDNPKFDIEHTVPRSVGGDSTQMNLTLCDATFNRQVKGAQLPSQLSNHADILVRIDHWKSKCEDLRKQLDKIRTYGGMEKNMKDRLIQKRHRLKMDLDYWQGKYSRFTMTEVPEGFSRRQGAGIGLVSKYAGLFLKSLFHNEQNPNKSNVYVVKGVTTAEFRRMWGLQGEYEKKSRLNHCHHCIDAITIACIGKAEYDKMAQYYHDEELFQWRGTTTKPHFNKPWPTFTEDVLAIEQSLLVKHLTKDNMPKQAKKRVRTATGKYLAQGDTARGSLHKDTYYGAIEQNGEIRYVLRKPLNKFENEAELEKIVDQA

SEQ ID NO: 618 - protein, 1375 aa, Prevotella sp.
MKKILGLDLGTTSIGWALVNESENKDEQSSIVRLGVRVIPLTVDEKGNFEKGKAITTNADRQQVHAARINLQRYKLRRENLRDCLQKQGWIGSEPMCEDGKSSTFETYKLRAKAAVEEVSLHEFARVLFMLNKKRGYKSNRKANDKEEGKLFDGMTIAKKLYEEHLTPAEYSLQLLNTGRKFTPEYYRSDLIEEFEKIWNEQQKYYPEILTDEFKQQLEGKAKSNTSKLFLGKYGIYSADTKGLDRRLQPLKWRVEAMKQQVDKDVLAFVISDLKGQIANTSGLLGAISDRSKELYFSKQTIGQYLWASLQENPHISIKNQPFYRQDYLDEFEKIWETQATYHKELTSELKQEIRDIIIFYQRPLKSKKNLIAVCELEQRKVKVTVDGKEKEITIGPKIAPKSSPMFQEFRIWQNLNNILLLDHETNSKRPLYEEERNLLYEELSVKEKLSKTEALKVLGKKSKQWDLNYKELEGNRTQAVLYDCYNRIIVMSGHEECNFKKLKASDIRHYVKMIFKNLAFNTDILCFDSSLKGHELERQPMCQLWHLLYSYEGDNSRTGNDALLRKLETSFGFPKEYAAVLADVIFEDSYGNLSVKAMRNILPHLQAGKDYSQACEEAGYKHSRRSLTKEELNQKVYKEKLELLPKNSLHNPVVEKILNQMVNVINAVIEEYGKPDEIRIELARDLKIGAAERENMTRSINQGNAENKRIREILEKEFALSYLSRNDIIKYKLYEELKSNGFKTLYSDTYISKDKLFSKDFDIEHIIPKARLFDDSLSNKTIEARDVNIAKSNKTAFDFILERYGEQGVKTYKTKLLRLLEDGAISNKKYNNLLKTEADIPSGFIDRDLRNTQYIAKKAYEILSELVKIVTPTTGSVTNRLREDWQLVDVMKELNFEKYQKLGLADVIEDRDGRKVKRIKDWTKRNDHRHHAMDALTIAFTKPSYIQYLNNLNARSDKSSSIYGIEVKELHREEGKFRFNAPLPINEFRAEAKRHLKSVLVSIKAKKKVMTQNVNKIKTKHGIIKKVQLTPRGELHNATYYGTKKRPLVRMVKVGAALDEATIKRVCSPAIRAALLKRLNAYNGDAKEAFTGRNSIDKNPIYLDIEQTKLVPVLVKTIEWGMYHPIRKRITPDLKIDKVIDKGIREKLKARLAEFNGDAQKAFSNLDENPIYMDEAKRITLKRVSIEGVLSAIPLHTLKDKAGKPVIGSDGKPVFGDYVQTSNNHHIAFYIDDKGNLQDNPVSFFEAAERKSQGVPVIDRRYNCDKGWHFVFTMKQNEYFVFPNEATGFIPSEVDLLDEANYCIISPNLYRVQKLSKASGRDYWFRHHLETMLNDDLRLKNSTFKRIQSLKGLEDIVKVRINSIGKIVAVGKYD

SEQ ID NO: 619 - protein, 1483 aa, Prevotella sp.
MKTILGLDLGTNSIGWAKVSVDDYGNYLHDIKLGSRIIPMSQDVLGNFDSGVTVSQTAQRTEFRSKRRLVQRNLQRRERLHRVLHVLDFLPAHYDAAIGWDRTEAVTYGKFLNHAEPKLAWEELGNGKRRFLFMDSFHEMVADFARCQPALVADGKKIPLDWTIYYLRKKALTQAITKEELAWILLNFNQKRGYYQLRGEEEEENPTKQEEYYELKVVSVEATDSRKGNDTWYNVHLENGWIYRRSSKISLDDWVGKVKQFIVTTEYEKDGTTLKTDKEGNVKRSFRAPNENDWGLRKKRTETLLEMSGKTVGAFIYDHLLQEPADKIRGNFIRTIERHYYKAELEAILAEQCKYHIELRDKEMLEACARELYLNNLPHQRSLMKKDMTYLLLYDLIFYQRPLKSKKALIANCPYEYYEYVDKETGEIKRQNIKCIAKSNPYFQEFRLWQFVLNLRLFDRVEDKEVTANYLPTADDHARLFTYLNDRKEINQETLLKDYFKLKKVKIGNEKEYPIRWNYIEDKEKKYPCNETRYELLMALDRAGIEHKWLDDNNLEYRLWHLLYSVEVKSESETALRKLKNDDAFVNSFLKVKPFKKEYGAYSEKAIKRLLAVMRKGFLWNEQDICDETRKRIEIIIKGDVDEKVKERMGHAAYSFDRVSDFQGLPEWLACYVVYGRHSEAMDIQRWDSPERLMAYINNFKQYSLRNPIVEQCILETLRTVHDIWKETGQIDEIHVELGREMKSTSEERARRTQNVLRNENTNLRIKSLLIELKNDTDICNVHPYSPMQQEILRIYEEGALQELNREDEDFEEISKISQMSQPSGKELNRYKLWLEQKYRSPYTGKAISLAKLFTPAYQIEHVIPQSRYFDDSFTNKVICEAEVNTLKSNLLGYEFIKKHGGEIIHCTTLGDVRIFSESEYKAFVMDHYANNKSKKDKLLMEDIPQEFLSRQMNDSRYISKVVKTLLSNIVRMADESEATSKSVIVCTGGVTDRLKKDWGLNDVWNSIVYSRFERLNRLTGTEAFGHWENKDGKRVFQTSMPLELQRGFRKKRIDHRHHAMDALVIACASRNIVNYLNNESANNPKKREDLRRQLCDKNRVIRKPWETFTQDAYNALENVVVSFKNYVRVINKATNRYEHYDENGKKRFVQQKGSELWAIRKPMHKETYYGHVNLRRKELVTLQKALDDIPSICDKKLRDYISALVEKHFNKRQLLAHFKSTDYYWQKQYVNKVYVWTFSDDIKPLVATRKLLDTSFDAKRIGTITDTGIQKILRNYLEAKGGNATLAFTPEGIVEMNQNISKYNDGKPHQPILKVRITEPMGAKYRVGQTENKMAKYVEAQSGTNLYFAIYEDSEGKRSYTTVPLDEVAERLKQRLSPVPEKDENDVPLKFYLSPNDLVYVPTEEELQLRECKLNKDRIYKMVSSTGSECHFIPYYVANVIYNKVEFEAKNKIGRALTGEMIKAVCWKLEIDRLGNILKVIK

SEQ ID NO: 620 - protein, 593 aa, Prevotella sp.
MNTRILGLDTGTNSLAWAVVDRDAKGNYTLVRRGDVIFTEGVNVDGQPVPSKAAVKSKYKSLRVQYARRRLRKIDTLKVLVSLDLCPYLSDQQLSQWKAKKTYPLTDDFMLWQRSGSAEENNPYYCRYRCLTQKLDLTDQSQRFLLGRAFYHLAQRRGFLSNRLDTTSDSAESGKVKSGIAQLSVEMEKAGCTFLGEYFYQLYKQHGNTVRLRSRYTDREEHYIKEFLAICEKQELDAQWVEKLQRALYFQRPLKSQRKGVGKCTFEPKKPRCAESHPDYEAFRMLCILNNIKIKTPKDVSLRPLNAEEREKVWPLFFRKSKPNFDFEDIAKALAGKNNYAWYKDAGEKPFRFNYRMHQGVSGCPVTAQLIDIFGSDWKAGIAETYTAVGKKNGTKTIDEMADDVWNVLYSFSSKDKLKAFATDKLQLDEARATKFANAKLPHGFAALSLKAIRNILPFLRQGFIYAHAVLLAKIPDIVTAAVWDDADKREQILSGLLEVIENYNPDDRGIEGTIDFCIKSHLQDVVDLRPGAADALYHPSMIEAYPDAKLNKMGVFQLGSPRTNAIRNPMAMRSLHILRSVVNLLLRDGMLS

SEQ ID NO: 621 - protein, 1424 aa, Prevotella sp.
MTQKVLGLDLGTNSIGSAVRNLDLSDDLQWQLEFFSSDIFRSSVNKESNGREYSLAAQRSAHRRSRGLNEVRRRRLWATLNLLIKHGFCPMSSESLMRWCTYDKRKGLFREYPIDDKDFNAWILLDFNGDGRPDYSSPYQLRRELVTRQFDFEQPIERYKLGRALYHIAQHRGFKSSKGETLSQQETNSKPSSTDEIPDVAGAMKASEEKLSKGLSTYMKEHNLLTVGAAFAQLEDEGVRVRNNNDYRAIRSQFQHEIETIFKFQQGLSVESELYERLISEKKNVGTIFYKRPLRSQRGNVGKCTLERSKPRCAIGHPLFEKFRAWTLINNIKVRMSVDTLDEQLPMKLRLDLYNECFLAFVRTEFKFEDIRKYLEKRLGIHFSYNDKTINYKDSTSVAGCPITARFRKMLGEEWESFRVEGQKERQAHSKNNISFHRVSYSIEDIWHFCYDAEEPEAVLAFAQETLRLERKKAEELVRIWSAMPQGYAMLSQKAIRNINKILMLGLKYSDAVILAKVPELVDVSDEELLSIAKDYYLVEAQVNYDKRINSIVNGLIAKYKSVSEEYRFADHNYEYLLDESDEKDIIRQIENSLGARRWSLMDANEQTDILQKVRDRYQDFFRSHERKFVESPKLGESFENYLTKKFPMVEREQWKKLYHPSQITIYRPVSVGKDRSVLRLGNPDIGAIKNPTVLRVLNTLRRRVNQLLDDGVISPDETRVVVETARELNDANRKWALDTYNRIRHDENEKIKKILEEFYPKRDGISTDDIDKARYVIDQREVDYFTGSKTYNKDIKKYKFWLEQGGQCMYTGRTINLSNLFDPNAFDIEHTIPESLSFDSSDMNLTLCDAHYNRFIKKNHIPTDMPNYDKAITIDGKEYPAITSQLQRWVERVERLNRNVEYWKGQARRAQNKDRKDQCMREMHLWKMELEYWKKKLERFTVTEVTDGFKNSQLVDTRVITRHAVLYLKSIFPHVDVQRGDVTAKFRKILGIQSVDEKKDRSLHSHHAIDATTLTIIPVSAKRDRMLELFAKIEEINKMLSFSGSEDRTGLIQELEGLKNKLQMEVKVCRIGHNVSEIGTFINDNIIVNHHIKNQALTPVRRRLRKKGYIVGGVDNPRWQTGDALRGEIHKASYYGAITQFAKDDEGKVLMKEGRPQVNPTIKFVIRRELKYKKSAADSGFASWDDLGKAIVDKELFALMKGQFPAETSFKDACEQGIYMIKKGKNGMPDIKLHHIRHVRCEAPQSGLKIKEQTYKSEKEYKRYFYAAVGDLYAMCCYTNGKIREFRIYSLYDVSCHRKSDIEDIPEFITDKKGNRLMLDYKLRTGDMILLYKDNPAELYDLDNVNLSRRLYKINRFESQSNLVLMTHHLSTSKERGRSLGKTVDYQNLPESIRSSVKSLNFLIMGENRDFVIKNGKIIFNHR

SEQ ID NO: 622 - protein, 241 aa, Prevotella sp.
QAVKEKIKEAIAGKNFKTAIAEPIFMNKEKGIRINKVRYYVKAQERLKIRQQRDLSSKEYKQFFCVENESNYLLAIYEGELKGKKERDFCVVNNLDSAACLKRSNKGKAAPLVPERSEERNLPLLAVLKRGTQVLFYENSPEEILFDNPQDLVRRLYKVTGINTKKDVKNGKTYLYGNIELRFHQNAQKKDDVKMQSGVYKNNEVLRQGIVLSHKQFKALVEGVDFEFNVLGEIKKKERHA

SEQ ID NO: 623 - protein, 1216 aa, Prevotella stercorea
MTKILGIDTGTNSLGWAIVDKTADNYNLLDKGVNIFQEGVKIEKGIESSKAAERTEHRATRVRYYRIKLRKIRLLRILSDNHLCPPLSQEELSTWRLKKVYPKNELFMQWQRTDDDTEKTPYAYRHKCIHEKLDLSDVTDRYILGRAFYHIIQRRGFLSNRKEQGGEDSGKVKEGISTLTHEMNEAGYEYLGDYFYALYNKGEKIRKHYTARNEHFLSEFKAICEKQDLEKELGSEVVRNIEKAIFDQRPLKSQKGQVGKCVFEKNKTKCPSSHPMYEEFRMLTFINNIKIKTPNDDVLRPLNTGEREKIMPLFFRKSKKQFDFEDITKKLAPKKMYGFYKKEEDAEMPFLFNYPMDTSVSGCPVTAALKDVFGDDWITAICETYTLGEGKSRFDIVNDIWHALYFYSDKDKLAEFAINRLQLSEDEAKIFSEISLPADYASLSLKAICKILPYLRRGLIYSHAVFLGNLCEVMPKYEWSIKEMRETIIDNIIMEMDKCDTKDKRTFEVCIKDYLKGQYNVSDNSLKKLYHPSMIETYPRVQYTNEHGVYQLGSPRIDSVRNPMAMRSMFRLRKLVNRLLVEGKIDQNTEVHIEFARELNDANKRNAIALFVKENQSANDEARKQIITLFKKETGTDIEPTDKDILKYVLWEEQNHICLYTGKQIRISDFIGANPKFDIEHTIPRSVGGDSTKMNLTLCDSRFNREVKKTKLPVELPNHDEIMERIKEWKKNYELLDIQIRKNKKLSKGATTKEQKDTIIRKRHLLELRRDYWRGKYERFTMESVPEGFSRRQGTDISVISKYARLYLKSLFNRVYTVKGIATSDFRKIWGIQDIYSKKERINHVHHCIDAIVIACIGLDEYNKLGAYYHDEENNKWYGMSKASFKKPWATFVEDIKKIQDEILVYHYTPDNMPKQGRRRIKIDGKKILCKGDAARGSLHNDTYYGAIENDGAVKYVKRIDLASLEEKDVKNIVDDTVRSIIEAAIKEKGFKDAMASTIWMNEEKRVPIKKVRCFTPSITKPLNIRKQRDVSIKEYKQQYHVANDSNYLLALYIGTDNKGKEKREFEIVNILQAAQYYRTSNDKEVVDRHIVPIKSEHDYPFAYTLKIGTMVLLYEKSPNEVWDATIKERNRRLYKVTGLSTMRMKGRNGEYAYATVKLIHNEEARPSKDIKAKNGEYEQGEEFRPAIIMLHTQLNALVQGYDFEINELGEIRRLR

SEQ ID NO: 624 - protein, 1487 aa, Prevotella timonensis; identical to SEQ ID NO: 135

SEQ ID NO: 625 - protein, 770 aa, Pseudoramibacter alactolyticus
MAKGYFASDEEIDFSGVDDGFKNTLSSHQKFKEIFDVEVLNDWQKSMSEKIIFWATVYGDSKKFLKERLEDAYGNELDQKQIKRILGLRFKDWGRLSEAFLNLEGKNSKTNQSQTIIEALWNGDGTNNFNLMELLSSQFTYRDTLKKRALKGEKTLTNITYEDLSDLYLSPSVRRMVWQTILIVKELRQVLGAGPAKIFIEMARDVTLKAGTRTTSRRQQLLDLYKNVQTESRNWVEEIETQEESRFRSKKIFLYYTQMGQCMYTGEPIVFKDLFNRNLYDIDHIYPRHFVKDDSLINNLVLVKKQANSHKSDTFPIENSIQQARRDFWKWLSEKGLISREKFNRLTRRTSFSDEELAGFISRQIVETRQGTKAVAQIFENALPDSEVVYVKAGNVSDFRHHFNLLKCREINDLHHAQDAYLNVVVGNVYHTKFTKNPINFIKGYRKDRKAYAYHMDQIFDHPVKRNDIIAWQTDKNQSIATVKKVMAKGTPLVTRMSYEEHGELSNQNICSAKAAQKAEGKGYLPIKNSERLSNTQRYGGYNKYAGSYFFLVEHTLKKNRVRTIETMPLFLRDTIKTSKDLLKYCCESLKLEAPSIRVMKIKMGSLLSVNGAFVYLTGRSGKKLITPNGFQLILPQKWQDYIRLLIKTKDSPDDVEGISGGKNIEFYDILVEKHTKTCLKNRPNPIGEKLREWRNDFIALDNQKQSDILLEILKLTTFDNSGADLRAIGGKNQSGVSTIGKKISSQKSVVLVHRSVTGIFEKQVDLLSI

SEQ ID NO: 626 - protein, 103 aa, Rhizobium etli
MSGEQLTREIGRSGVKASAVGLGTWAIGGWMWGGTDEAQSIAAIQASLDAGVTLIDTAPAYGLGRSEEIVGKALAGRRDKAVIATKCGLVWHTQKGNHFFDQD

SEQ ID NO: 627 - protein, 1059 aa, Rhodovulum sp.
MGIRFAFDLGTNSIGWAVWRTGPGVFGEDTAASLDGSGVLIFKDGRNPKDGQSLATMRRVPRQSRKRRDRFVLRRRDLLAALRKAGLFPVDVEEGRRLAATDPYHLRAKALDESLTPHEMGRVIFHLNQRRGFRSNRKADRQDREKGKIAEGSKRLAETLAATNCRTLGEFLWSRHRGTPRTRSPTRIRMEGEGAKALYAFYPTREMVRAEFERLWTAQSRFAPDLLTPERHEEIAGILFRQRDLAPPKIGCCTFEPSERRLPRALPSVEARGIYERLAHLRITTGPVSDRGLTRPERDVLASALLAGKSLTFKAVRKTLKILPHALVNFEEAGEKGLDGALTAKLLSKPDHYGAAWHGLSFAEKDTFVGKLLDEADEERLIRRLVTENRLSEDAARRCASIPLADGYGRLGRTANTEILAALVEETDETGTVVTYAEAVRRAGERTGRNWHHSDERDGVILDRLPYYGEILQRHVVPGSGEPEEKNEAARWGRLANPTVHIGLNQLRKVVNRLIAAHGRPDQIVVELARELKLNREQKERLDRENRKNREENERRTAILAEHGQRDTAENKIRLRLFEEQARANAGIALCPYTGRAIGIAELFTSEVEIDHILPVSLTLDDSLANRVLCRREANREKRRQTPFQAFGATPAWNDIVARAAKLPPNKRWRFDPAALERFEREGGFLGRQLNETKYLSRLAKIYLGKICDPDRVYVTPGTLTGLLRARWGLNSILSDSNFKNRSDHRHHAVDAVVIGVLTRGMIQRIAHDAARAEDQDLDRVFRDVPVPFEDFRDHVRERVSTITVAVKPEHGKGGALHEDTSYGLVPDTDPNAALGNLVVRKPIRSLTAGEVDRVRDRALRARLGALAAPFRDESGRVRDAKGLAQALEAFGAENGIRRVRILKPDASVVTIADRRTGVPYRAVAPGENHHVDIVQMRDGSWRGFAASVFEVNRPGWRPEWEVKKLGGKLVMRLHKGDMVELSDKDGQRRVKVVQQIEISANRVRLSPHNDGGKLQDRHADADDPFRWDLATIPLLKDRGCVAVRVDPIGVVTLRRSNV

SEQ ID NO: 628 - protein, 1405 aa, Riemerella anatipestifer
MKTILGLDLGTNSIGWALVKEAENSNEKSEIIKLGVRVNPLTVDEKTNFEAGRPLSTNADRTAKRSARRNLQRYKLRRKNLIDLLIKNQLIDKDTPLTEIGKNTTHQTLELRAKAARERIELEDLARVFLAINKKRGYRSSRKVNNEEEGQAVDGMAVAKKLYDENLTPGQYAYELLSKGKKYVPDFYRSDLQAEFNAIWEYQKQFYADILDDELYNALKGQGQQNSRKRFLAIKGVYTAENKGKRDDVKLRHYKWRSEAISKKINIEEVAYVLVEINNDLNKSSGYLGAISDRSKELYFNKETVGENLWKQIQKNPHTSLKNQVFYRQDYLDEFEQIWETQAQFHPQLTLALKEQIRDVIIFYQRKLKSQKGLLSFCQFESWEIERKDENGNVILNKTTQLPKRQTVGRRVAPKSSPLFQEFKIWQNINNLEVTKISEGASKNKKETETLSDDERKLLFEELNLRGNLSQKEVLQILGLKDKEYKTNFSEGLEGNRTNAALFNIYQQIAENEGYGFDWSKKSAQEIKEELKAVFPQIGIQADILDFNANLDGKEFENQASYQLWHLLYSAEEDDKINEEDQIIYGNSAVSLKKKLCEKFGFTPEYAKWIANVSLQDDYGNLSTKAMRKIIPYLIDGNDYSEACALAGYNHSNSLTKEENDNRELLDKLELLPKNSLRNPVVEKILNQMVNVVNQVIETYGKPDEVRIELARELKKSAEKRAEMTKSINEATRRNEDIKKLITKDFGIPNPTKSDVVRYRLWEELAPLAYKDVFTGKQIKKEDLFSSKIDIEHIIPKALLFDDSFSNKTLVFRETNLKKADRTAYDFIESDYNATLDDYIQRVETLYNNTKGTISKGKRNKLLMAQKNLPDGFIERDLRNSQYIAKKAKAMLYQVFKDVNVTSGSITDRLREDWDLINVMKELNFPKYKALGLTEIEERYDIGQEKTKRVEVITDWTKRNDHRHHAMNALTVAFTTSSHIQYLNYLNARKNESHKEHKNIKGIENKITHKQKDKRKFIPPMPNFREEAKKHIETILVSIKNKNKVYTKNINKTKKKSGHNTKEQLTPRGQLHKETVYGKSKRPMSKPTKINKNFSLEQAQLIINVQEKELVLRHLAQFDNNPAVAFDTKTLKKMPLLKNGEPLKEVLCFEEIFTIRKDITPDLKIEKVVDEKIKAILEQRKKDFGGNAKEAFSDLDKNPIWLNKKKGICIKRVTITGVSNAEALHHQKDHLGREILDDNGNPIPADFVSTGNNHHLAVYLDSEGKLQDNIVSFYEAVVRTSQGLPVVDKGLNKDLGWKFLFSLKQNEMFVFPNDDFDINDFDLLDDKKAELISKHLYRVQKISKVSAGNSFVRDIVFRHHLETTVKEVKELKDISYIQLKSLEGLRNIKKVRINHIGKIVQVGEY

SEQ ID NO: 629 - protein, 1145 aa, Riemerella anatipestifer
MKTILGLDLGTNSIGWALVKETENSNEKSEIIKLGVRVNPLTVDEKTNFEAGRPLSTNADRTAKRSARRNLQRYKLRRKNLIDLLIKHRLIDKDTPLTEIGKNTTHQTLELRAKAARERIELEDLARVFLAINKKRGYRSSRKVNNEEEGQVVDGMAVAKKLYDENLTPGQYAYELLSKGKKYVPDFYRSDLQAEFDSIWEYQKQFYADILDDELYNALKGQGQQNSRKRFLAIKGVYTAENKGKRDEVKLQHYKWRSEAITQKLSIEEVAYVLVEINNDLNKSSGYLGAISDRSKELYFNKETVGENLWKQIQKNPHTSLKNQVFYRQDYLDEFEQIWETQAQFHPQLTLALKEQIRDVVIFYQRKLKSQKGLLSFCQFESWEIERKDENGNVILNKTTQLPKRQTVGRRVAPKSSPLFQEFKIWQNINNLEIAKISDGNSKNKKETEALSDDERKLLFEELNLRGNLSQKEVLQILGLKDKEYKTNFPEGLEGNRTNAALFNIYQQIAENEGYGDWTKKSAQEIKEELKAVFPQIGIQADILDFNAELDGKEFENQASYQLWHLLYSAEEDDKINEEDQIIYGNSAVSLKKKLCEKFGFTPEYAKWIANVSLQDDYGNLSTKAMRKIIPYLIDGNDYSEACALAGYNHSNSLTKEENDNRERLNKLELLPKNSLRNPVVEKILNQMVNVVNQVIETYGKPDEVRIELARELKKSAEERAEMTKGINEATRRNEDIKKLITKNFGIPNPTKNDVVRYRLWEELAPLAYKDVFTGRQIKKEDLFSSKIDIEHIIPKALLFDDSFSNKTLAFRETNLKKADRTAYGFIESDYNATLDDYIQRVETLYNNAKGTISKGKRNKLLMAQKNLPDGFIERDLRNSQYIAKKAKSMIEKVFNDVNVTSGSITDRLREDWDLINVMKELNFPKYKALGLTEIEERYDIGQEKTKKVEVITDWTKRNDHRHHAMDALTVAFTTKSHVQYLNNLNTIHSLKGDEVDLELSKLYGLKNTITEVVNKKRKFIPPMPNFREEAKKHIETILVSIKNKNKVYTKNINKTKKESGYHTKEQLTPRGQLHKETVYGKSKRPMNKPTKINKNFSLEQAQLIINVQEKELVLRHLAQFDNNPAVAFDTKTLKKCHYLKMVNL

SEQ ID NO: 630 - protein, 1400 aa, Riemerella anatipestifer
MKTILGLDLGTNSIGWALVKETENSNEKSEIIKLGVRVNPLTVDEKTNFEAGRPLSTNADRTAKRSARRNLQRYKLRRKNLIDLLIKHRLIDKDTPLTEIGKNTTHQTLELRAKAARERIELEDLARVFLAINKKRGYRSSRKVNNEEEGQVVDGMAVAKKLYDENLTPGQYAYELLSKGKKYVPDFYRSDLQAEFDSIWEYQKQFYADILDDELYNALKGQGQQNSRKRFLAIKGVYTAENKGKRDEVKLQHYKWRSEAITQKLSIEEVAYVLVEINNDLNKSSGYLGAISDRSKELYFNKETVGENLWKQIQKNPHTSLKNQVFYRQDYLDEFEQIWETQAQFHPQLTLALKEQIRDVVIFYQRKLKSQKGLLSFCQFESWEIERKDENGNVILNKTTQLPKRQTVGRRVAPKSSPLFQEFKIWQNINNLEIAKISDGNSKNKKETEALSDDERKLLFEELNLRGNLSQKEVLQILGLKDKEYKTNFPEGLEGNRTNAALFNIYQQIAENEGYGDWTKKSAQEIKEELKAVFPQIGIQADILDFNAELDGKEFENQASYQLWHLLYSAEEDDKINEEDQIIYGNSAVSLKKKLCEKFGFTPEYAKWIANVSLQDDYGNLSTKAMRKIIPYLIDGNDYSEACALAGYNHSNSLTKEENDNRERLNKLELLPKNSLRNPVVEKILNQMVNVVNQVIETYGKPDEVRIELARELKKSAEERAEMTKGINEATRRNEDIKKLITKNFGIPNPTKNDVVRYRLWEELAPLAYKDVFTGRQIKKEDLFSSKIDIEHIIPKALLFDDSFSNKTLAFRETNLKKADRTAYGFIESDYNATLDDYIQRVETLYNNAKGTISKGKRNKLLMAQKNLPDGFIERDLRNSQYIAKKAKSMIEKVFNDVNVTSGSITDRLREDWDLINVMKELNFPKYKALGLTEIEERYDIGQEKTKKVEVITDWTKRNDHRHHAMDALTVAFTTKSHVQYLNNLNTIHSLKGDEVDLELSKLYGLKNTITEVVNKKRKFIPPMPNFREEAKKHIETILVSIKNKNKVYTKNINKTKKESGYHTKEQLTPRGQLHKETVYGKSKRPMNKPTKINKNFSLEQAQLIINVQEKELVLRHLAQFDNNPAVAFDTKTLKKMPLLKNGEPLKEVLCFEEIFTIRKDITPDLKIEKVVDEKIKAILEQRKKDFGGNAKEAFSDLDKNPIWLNKEKGICIKRVTITGVSNAEALHHQKDHLGREILDDNGNPIPADFVSTGNNHHVAIYEDEKGKLQEKVVSLYEAVARANQGLPVVDKGLNEDLGWKFLFTMKQNEMFVFPNDDFDVNDIDLLDENNAKIISQHLFRVQKLATKNYMFRHHLETNVQEVKELNDIAYKSIRSTEPLKNIKKVRINHIGKIVQVGEY

SEQ ID NO: 631 - protein, 1128 aa, Roseburia intestinalis
MDEKMDYRIGLDIGIASVGWAVLQNNSDDEPVRIVDLGVRIFDTAEIPKTGESLAGPRRAARTTRRRLRRRKHRLDRIKWLFENQGLINIDDFLKRYNMAGLPDVYQLRYEALDRKLTDEELAQVLLHIAKHRGFRSTRKAETAAKENGAVLKATDENQKRMQEKGYRTVGEMIYLDEAFRIGCSWSEKGYILTPRNKAENYQHTMLRAMLVEEVKEIFSSQRRLGNKKATEELEEKYLEIMTSQRSFDLGPGMQPDGKPSPYAMEGFSDRVGKCTFLGDQGELRGAKGTYTAEYFVALQKINHTKLVNQDGETRNFTEEERRALTLLLFTQKEVKYAAVRKKLGLPEDILFYNLNYKKAATKEEQQKENQNTEKAKFIGMPYYHDYKKCLEERVKYLTENEVRDLFDEIGMILTCYKNDDSRTERLAKLGLVPIEMEGLLAYTPTKFQHLSMKAMRNIIPFLEKGMTYDKACEEAGYDFKADSKGTKQKLLTGENVNQTINEITNPVVKRSVSQTVKVINAIIRTYGSPQAINIELAREMSKTFEERRKIKGDMEKRQKNNEDVKKQIQELGKLSPTGQDILKYRLWQEQQGICMYSGKTIPLEELFKPGYDIDHILPYSITFDDSFRNKVLVTSQENRQKGNRTPYEYMGNDEQRWNEFETRVKTTIRDYKKQQKLLKKHFSEEERSEFKERNLTDTKYITTVIYNMIRQNLEMAPLNRPEKKKQVRAVNGAITAYLRKRWGLPQKNRETDTHHAMDAVVIACCTDGMIQKISRYTKVRERCYSKGTEFVDAETGEIFRPEDYSRAEWDEIFGVHIPKPWETFRAELDVRMGDDPKGFLDTHSDVALELDYPEYIYENLRPIFVSRMPNHKVTGAAHADTIRSPRHFKDEGIVLTKTALTDLKLDKDGEIDGYYNPQSDLLLYEALKKQLLLYGNDAKKAFAQDFHKPKADGTEGPVVRKVKIQKKQTMGVFVDSGNGIAENGGMVRIDVFRVNGKYYFVPVYTADVVKKVLPNRASTANKPYSEWRTMEDKDFLFSLYSRDLVHIKSKKGIPIKNVDGSLGESKEVYAYYIGADISGAKIEGKAHDSRYTFRGIGVQKLELIEKCQVDILGHISTVKNEKRMGFS

SEQ ID NO: 632 - protein, 1471 aa, Scardovia wiggsiae
MGYKAPRNDKGEIDYGVGLDLGNGSVGWVAMDKDYHLIRARGHELIGARLFDPANSAENRRESRTTRRRLSRRRWRLRMLDSLFASELAKIDPNFLARRKYSWVHPKDEQNHENWYGSIIFGSKEQDKQFYKDYPTIYHLRKKLTEDTERHDIREIYVAIHHIVKYRGHFLREGEINSENLFDPEGFVELIKDVIKLNNSYDESTPIFEASPADVSEALLNEHTSRSGRIEDTLDKLDFSVSRVDKHELKGMRDAAKAVIGAIVGNTADFSKIFNLDNLDKDSKDNLKLKFADSNFDEKYGGVVGSGLLDETQIELVDRIHAVYDAVALKGILGDAHTISEAKVESYEKHRKNWKLIKEELRTKENKDEVDLWYGDLSGRQYKNPPDPEKGPDEGSKKDSPIRDSDQKQNLIKKANDYFTELIDDSQLSEEQKNCLKNDINNGQLFPVQRSSDNGVIPYQIHLNELRRIIENQKQYYPFLAETFIRKTAEGKSYEENKIVALLKFRVPYYVGPLVSKEDMEEHSSGNSAYHWMARNPGRGEAITPWNFDEVVDKDESGARFISRLTGTDTYLLGEPTLPQHSLLYEEYMVLSELNNVRLNVRQGNHWSDKNRQRLSYKQKEFLIENLFKEHKTVTRKRAEDCLSSMGCGEVQLFGLSDEKKFASSLSSYITLKKILGKAFVDDSGNSAILERIIEVQTVFEDREPLTHQLSLIDSLTVEQRKQLAKIHYTGWGKLSRKLLTSKKGSYKIHSQNEIMRTQHSIIDIMRGDSLNLIEIIRDKKIGIGEWIDNENLDRETGESDVSRLESVFEGIVMSPRVKRGVVQAVRVIDDLAKAIGNPPQRIFIEMADEVQASQRTVSRLSRLKALYGSPSLQKEFNDLKDLRKSLNETKDADLQEDRLYLYYIQLGKDLYTGKEISIDSLSSAYDIDHIVPQALTQDDSIDNRVLVSRKENARKTDSYLYTPDLIKNMRPLWGKLLAAGLMSQKKYDALTRVDDFKDREKQRFVQRSLVETRQIMKNVSTILRTYYGEDTNVVTLKSSITHDMRKYLGFPYKNRDINDYHHAQDALCISAAGQFMLNRHFVSGGEVTDGASNAYNMYLAEYLQEFRDAKARGERKRSTAFGFVVGSMSSKDDEKRTDHRTGEIVWSETNAEYLRKVMNYKKMLITQKVGDVKTRALYDETRYGHKESSAKSIKFDNLRRDTSLYGGFSGASTAYMMLVEYKKKNKLVSITAQEASLLAVADQKNDTVSVMDGILASHGLSGAKILLPKIVTGQLLDYSDALVTLQSASELNTARQMWLPRNDYNDIDIILKSKDIEDAAHKLGYDSDTVHVLRRIQKLFEAVFRVAESQFPLHQLSKDQQEEILRDPQNYGFGSAVKLLGGLLKALHANAENTNLAGLVKVLHGDKEYSDDGKAKEFKKFGFSPRWRRISNPTGFTLSDSDTFIYQSPSGIFEQRVTVKELKEKADKQK

SEQ ID NO: 633 - protein, 116 aa, Sphingobacterium spiritivorum
MFRKYFEEKNSARLLFTLKQGDFVYVPDDNEEVILDESSPLFIDYWKNISERSNNIHVVQKFSGKEIYFLKHTIADTIAKKIEFGSQDCYQSLNGKSIKEFCIKIDSDRLGNISKV

SEQ ID NO: 634 - protein, 1306 aa, Sphingobacterium spiritivorum; identical to SEQ ID NO: 98

SEQ ID NO: 635 - protein, 1110 aa, Sphingobium sp.
MAEGKKRIWRLGADLGANSLGWAAIELSAPVNGKPIAILAAGSRIFSDGRDPKSGASLAVDRRDARAMRRRRDRFKQRQKALIKYLIADGLFPADEAARNAMAAIDPYAVRARALDEALSLPELGRALFHLNQRRGFKSNRKADRKADDDAGKIAIGIDRTRDAIAEDEADAGAEPGSWTFGKWLHERRLKGQSVRTRLRPESGEDAKGDGYDFYPDRALMEEEFDAIWAAQAPHHPDVLTNDVHDRLHEIIFYQRPLKAPQVGMCSLIPGDRRLPKAHPLFQRRRLLEELNALMIVRPGEVAQRLTREERDILLLKLKDKNKVSFATLRKALKLDPDARFNKESEDRTDLKGDEVAAVMGSKTRFGNLWVHLSIEAQWDVLARLDAVESDAEDAAFCAWLVETYALTPEQARAVANAPLPPGYGRFGETATRKLIEALRDGKKDDRVLVYSEAVTEAGLGHHSDRRTGEVFEDAKGRPQLPYYGVALERHIMPGTGDPSDPEEMRVGRLTNPTVHIGLNQLRRILNVLIRAYGPPAEIAIELARELKLTDEDKKRINRENNDNRIAAERRSEKLLAIGQADSGANRALLKLWEELNPANVLDRRCIYSGRQISIDMLFSAAVEVDHILPFAATLDDSNGNKIVCLREANREKRKRSPHDAWGHSARWDEIAARAAQLPRNKRWRFEPDAMDKFRDEGGFQARHLVDTQYLARLSREYLATLYPEKGEGSGHIWVSPGRLTEMVRRKLGLNDLLPDHNFGGGADQAKNRLDHRHHAIDAVVVAIVDRGMLNAIARASGQEGAEGRERIIIPEPWDGFRDALRETVNRITVSHRTDHGTASKAGLPKGKDATAGRLHNDTAYGFTGDTDAKGNSIVVRRVPLSSFKKLADLDRIRDADLKAALYQHLNGLEGKAFEKALAEFHKLEWHNFGGVRRVRVTEPLTVIPIKDRNGRIYKGYKGDSNYRYDVWELPDGKWVTNWKNEAGEAMSSVISMFDAHQSSEPPRPHPAARKILSLHQNDLLAIEREGEDRKLMRVVKFGQSGQITLAEHQQAGDLKKRDAVSNDDDPFKYFAPTSGGLKKVKARQVRIDEIGRVLDPGFPARTARRKTRG

SEQ ID NO: 636 - protein, 1084 aa, Sporolactobacillus vineae
MKYSIGLDIGISSVGWSVINLDRERIELMGARLFDAAENPKNGSSLAAPRRDARSARRRLRRRRYRVGRVRHFIIDRGLVTRGQADQLFDWKDGDLDIWLVRVNALERLLTDREFARVLIHIAKNRGYRSNRKSEAKSGENGQVLSAIKANKELMEEKGYQTVAEMLVNEPETFAGRKRNRGGEYTHVIARSELEHEIRLIFTKQRAFGNRFATEENENTYVKIWAAQRPVATKDDILKKIGDCTFEKGEKRAPKASYAFQYFRALDKLNRLRILSVREPSRNLTDDERNLIVPALFNHDKQKYSDLRKILQLRDDQKFNELFYDPGKSLKENENKTFLSLAEQYKIRKVIRDVQGKDGLLQYRPLDIDTIAYALTVFKDDQDTRDYLSNTFVNGNGKQVLNLANRAFDAELIDGLLSLSFAKFGHLSLKALHKLIPHMEQGLSYYDACKKVGYHDNEQVGKSKQHLLPVIPADEIRNPVVVRSLSQTRKVINAIIKRYGSPTFMYIELAREMGRPYNERRDLEKQYNKNRTVNDSAIEQIHELYPEIGAPRGHDILKYKLWQQQDCKCAYSLEKIPAEKIFEPGYAEVDHIIPYSRSFDDSNSNKVLVLSRMNQEKKNRTPYEWFGGDEHRWNKFESYVNALKVNRKKKSLLTKKNMDTEEEDTFKSRHLNDTRYITRFIKSFVEDNLLFREIEGAKQHVFTVNGAYTSLMRKRWGFNKNREESDLHHSVDAVIIAVSQPFRNEVSRYFKHREISLPQLLKRTWDYFPEPWEGFVKELRARTLQDPEKLKLALESLDLDSYDPEFIDEVKPIFISRMPKRSIKGQIHDETLRRNRGKTKDGFVKIVTRTRLENIKFDKNGDFPMYGRESDPKTYQAIKQRYLENNKDKKKAFIEPLYKPAKNPNNASLIRSVKIEDKANQIVPLRDEAVAYNASIVRTEVYRNKETGKFYLAPVYVSDVFAGREPRRFIRANVPYEQWVNITDKFTFLFNLYPNDVIYIKMKKVKTTKSNINKTISWQESYFYFKGTDIHTGAITIIDHMNSFTDRVGTQGLQLFEKYQVDPLGNLSRVHGETQYGVPALSHS

SEQ ID NO: 637 - protein, 475 aa, Staphylococcus massiliensis
MGQDYILGLDIGITSVGYGLIDYHDKSVIDAGVRLFKEANVENNEGRRSKRGSRRLQRRRKHRLARTRNLLESYQLNPFPKCEKNPYEIRVKGFKEVLTSDELSAALLHLAKRRGIDNVHVTDTESDSSDNGLSTKEQLAKNQKALESRYVCELQLERLLNDNKVRGANNRFKTQDFVREAKQILSIQKDHHNLDQVFIDKYISLLETRREYYEGPGKGSPYGWDGDIKKWYELLMGRCTYFPESLRSVKYAYSADLFNALNDLNNLVIVRDENDKLTYPEKYHIVENVFKQRKKPTLKQIAKEIDVAPEDIRGYRVTASGTPVFTSFKLYHDIKSVTSNDKVLEDTELLDAIAEVLTIYQSPIEVQEKLESLNVILTKEEIEGISKLTGYTGTHALSLKAIQIVIDELWETNDNQMTIFTRLNMKPQKVDLAKANKIPTSLVEDFIISPVAKRAFIQSIKVINAVIKNMVCLKI

SEQ ID NO: 638 - protein, 581 aa, Staphylococcus massiliensis
MPKDIIIELAREKNSDEERKIIRDVQKRNQQTRDLVDKVIKETGKTKAKGMVEKLILHDKQEGKCLYSLKSIPLEDLLNNPHHYEVDHIIPRSVSYDNSMNNKVLVLQEENSKKSNQTPFQYFNSSNTHITFKQFKQHVLNLSKTKDRITKKKKEYLLEERDINKFSVQKEFINRNLVDTRYATRELMTLLRAYFSANELDVKVKAINGGFTSYLRKRWDFKKDRNAGYKHHAEDALIIANVDFIFKQLKALDNAKKVMEGRKVQVEKDNVEDNEHYESLFREPDQIKEIKLYDNYKFSHRVDKKPNRELINDTIYSTRKVDNKTYTIQTVNNIYDKQNDQLKKLFNKSPEKFLMYKHDPKTFDKLATIMRQYKNEKNPLYKFHDETGEYLTKYAKKDNGPIVKSLKYIGKQVNAHLDITNDYENSNNKVVKLSLKPFRFDVYLDDGKYKFVTVKYLDIIKKDTYYVIDEEKYKLALQQKKISENAKFIGSFYNNDLIKINGELLRVIGVNDDAKNTLELNMIDISYRDYVENMNLATTPRIRKNIGKSITILEKYTTDILGNTFKISSPEKPQFIFKVRD

SEQ ID NO: 639 - protein, 1334 aa, Staphylococcus pseudintermedius; identical to SEQ ID NO: 205

SEQ ID NO: 640 - protein, 1112 aa, Staphylococcus simulans; identical to SEQ ID NO: 252

SEQ ID NO: 641 - protein, 773 aa, Streptococcus agalactiae
MNKPYSIGLDIGTNSVGWSIITDDYKVPAKKMRVLGNTDKEYIKKNLIGALLFDGGNTAADRRLKRTARRRYTRRRNRILYLQEIFAEEMSKVDDSFFHRLEDSFLVEEDKRGSKYPIFATLQEEKDYHEKFSTIYHLRKELADKKEKADLRLIYIALAHIIKFRGHFLIEDDSFDVRNTDISKQYQDFLEIFNTTFENNDLLSQNVDVEAILTDKISKSAKKDRILAQYPNQKSTGIFAEFLKLIVGNQADFKKYFNLEDKTPLQFAKDSYDEDLENLLGQIGDEFADLFSAAKKLYDSVLLSGILTVIDLSTKAPLSASMIQRYDEHREDLKQLKQFVKASLPEKYQEIFADSSKDGYAGYIEGKTNQEAFYKYLSKLLTKQEDSENFLEKIKNEDFLRKQRTFDNGSIPHQVHLTELKAIIRRQSEYYPFLKENQDRIEKILTFRIPYYIGPLAREKSDFAWMTRKTDDSIRPWNFEDLVDKEKSAEAFIHRMTNNDFYLPEEKVLPKHSLIYEKFTVYNELTKVRYKNEQGETYFFDSNIKQEIFDGVFKEHRKVSKKKLLDFLAKEYEEFRIVDVIGLDKENKAFNASLGTYHDLEKILDKDFLDNPDNESILEDIVQTLTLFEDREMIKKRLENYKDLFTESQLKKLYRRHYTGWGRLSAKLINGIRDKESQKTILDYLIDDGRSNRNFMQLINDDGLSFKSIISKAQAGSHSDNLKEVVGELAGSPAIKKGILQSLKIVDELVKVMGYEPEQIVVEMARENQTTNQ

SEQ ID NO: 642 - protein, 1370 aa, Streptococcus agalactiae
MNKPYSIGLDIGTNSVGWSIITDDYKVPAKKMRVLGNTDKEYIKKNLIGALLFDGGNTAADRRLKRTARRRYTRRRNRILYLQEIFAEEMSKVDDSFFHRLEDSFLVEEDKRGSKYPIFATMQEEKDYHEKFPTIYHLRKELADKKEKADLRLVYLALAHIIKFRGHFLIEDDRFDVRNTDIQKQYQAFLEIFDTSFENNHLLSQNVDVEAILTDKISKSAKKDRILAQYPNQKSTGIFAEFLKLIVGNQADFKKHFNLEDKTPLQFAKDSYDEDLENLLGQIGDEFADLFSAAKKLYDSVLLSGILTVTDLSTKAPLSASMIQRYDEHREDLKQLKQFVKASLPEKYQEIFADSSKDGYAGYIEGKTNQEAFYKYLSKLLTKQEDSEYFLEKIKNEDFLRKQRTFDNGSIPHQVHLTELKAIIRRQSEYYPFLKENQDKIEKILTFRIPYYVGPLARGNSDFAWMTRKTDDSIRPWNFEDLVDKEKSAEAFIHRMTNNDLYLPEEKVLPKHSLIYEKFTVYNELTKVRYKNEQGETYFFDSNVKQEIFDGVFKEHRKVSKKQLLDFLAKEFEEFRIVDVTGLDKENKAFNASLGTYHDLKKILDKDFLDNPDNESILEDIVQTITLFEDREMIKKRLENYKDLFTESQLKKLYRRHYTGWGRLSAKLINGIRDRESQKTILDYLISDGRANRNFMQLINDDGLSFKSIISKAQSGSHSDNLKEVVGELAGSPAIKKGILQSLKIVDELVKVMGYEPEQIVVEMARENQTTNQGRRNSRQRYKLLEDGVKNLASDLNGDILKEYPTDNQALQNERLFLYYLQNGRDMYTGEALDIDNLSQYDIDHIVPQAFIKDDSIDNRVLVSSAKNRGKSDDVPSIDIVKARKAFWKKLLDAKLISQRKYDNLTKAERGGLTPDDKAGFIQRQLVETRQITKHVARILDERFNNKVDDNNKPIRKVKIVTLKSNLVSNFRKEFGFYKIREVNNYHHAHDAYLNAVVAKAILTKYPQLEPEFVYGDYPKYNSYKTRKSATEKLFFYSNIMNFFKTKVTLADETVVVKDDIEVNNETGEIAWDKKKHFATVRKVLSYPQVNIVKKTEVQTGGFSKESILAHSNSDKLIPRKTKDIYLDPKKYGGFDSPIVAYSVLVLADIKKGKAQKLKTVKELIGITIMERERFEKNPSAFLESKGYLNIRTDKLIILPKYSLFELENGRRRLLASAGELQKGNELALPTQYMKFLYLASRYNESKGKPEEIEKKQEFVNQHVSYFDDILQLINDFSKRVILADANLEKINKLYSDNKDNTPVDELAKNIINLFTFTSLGAPAAFKFFDKSVDRKRYTSTKEVLDSTLIHQSITGLYETRIDLGKLGED

SEQ ID NO: 643 - protein, 1370 aa, Streptococcus agalactiae
MNKPYSIGLDIGTNSVGWSIITDDYKVPAKKMRVLGNTDKEYIKKNLIGALLFDGGNTAADRRLKRTARRRYTRRRNRILYLQEIFAEEMSKVDDSFFHRLEDSFLVEEDKRGSKYPIFATMQEEKDYHEKFPTIYHLRKELADKKEKADLRLVYLALAHIIKFRGHFLIEDDRFDVRNTDIQKQYQAFLEIFDTSFENNHLLSQNVDVEAILTDKISKSAKKDRILAQYPNQKSTGIFAEFLKLIVGNQADFKKHFNLEDKTPLQFAKDSYDEDLENLLGQIGDEFADLFSAAKKLYDSVLLSGILTVTDLSTKAPLSAYMIQRYDEHREDLKQLKQFVKASLPEKYQEIFADSSKDGYAGYIEGKTNQEAFYKYLSKLLTKQEDSEYFLEKIKNEDFLRKQRTFDNGSIPHQVHLTELKAIIRRQSEYYPFLKENQDKIEKILTFRIPYYVGPLARGNSDFAWMTRKTDDSIRPWNFEDLVDKEKSAEAFIHRMTNNDLYLPEEKVLPKHSLIYEKFTVYNELTKVRYKNEQGETYFFDSNVKQEIFDGVFKEHRKVSKKQLLDFLAKEFEEFRIVDVTGLDKENKAFNASLGTYHDLKKILDKDFLDNPDNESILEDIVQTITLFEDREMIKKRLENYKDLFTESQLKKLYRRHYTGWGRLSAKLINGIRDRESQKTILDYLISDGRANRNFMQLINDDGLSFKSIISKAQSGSHSDNLKEVVGELAGSPAIKKGILQSLKIVDELVKVMGYEPEQIVVEMARENQTTNQGRRNSRQRYKLLEDGVKNLASDLNGDILKEYPTDNQALQNERLFLYYLQNGRDMYTGEALDIDNLSQYDIDHIVPQAFIKDDSIDNRVLVSSAKNRGKSDDVPSIDIVKARKAFWKKLLDAKLISQRKYDNLTKAERGGLTPDDKAGFIQRQLVETRQITKHVARILDERFNNKVDDNNKPIRKVKIVTLKSNLVSNFRKEFGFYKIREVNNYHHAHDAYLNAVVAKAILTKYPQLEPEFVYGDYPKYNSYKTRKSATEKLFFYSNIMNFFKTKVTLADETVVVKDDIEVNNETGEIAWDKKKHFATVRKVLSYPQVNIVKKTEVQTGGFSKESILAHSNSDKLIPRKTKDIYLDPKKYGGFDSPIVAYSVLVLADIKKGKAQKLKTVKELIGITIMERERFEKNPSAFLESKGYLNIRTDKLIILPKYSLFELENGRRRLLASAGELQKGNELALPTQYMKFLYLASRYNESKGKPEEIEKKQEFVNQHISYFDDILQLINDFSKRVILADANLEKINKLYSDNKDNTPVDELAKNIINLFTFTSLGAPAAFKFFDKSVDRKRYTSTKEVLDSTLIHQSITGLYETRIDLGKLGED

SEQ ID NO: 644 - protein, 1378 aa, Streptococcus agalactiae
MNKPYSIGLDIGTNSVGWSIITDDYKVPAKKMRVLGNTDKEYIKKNLIGALLFDGGNTAADRRLKRTARRRYTRRRNRILYLQEIFAEEMSKVDDSFFHRLEDSFLVEEDKRGSKYPIFATMQEEKYYHEKFPTIYHLRKELADKKEKADLRLIYLALAHIIKFRGHFLIEDDRFDVRNTDIQKQYQAFLEIFDTTFENNDLLSQNVDVEAILTDKISKSAKKDRILARYPNQKSTGIFAEFLKLIVGNQADFKKHFNLEDKTPLQFAKDSYDEDLENLLGQIGDEFADLFSAAKKLYDSVLLSGILTVIDLSTKAPLSASMIQRYDEHHEDLKHLKQFVKASLPENYREVFADSSKDGYAGYIEGKTSQEAFYKYLLKLLTKQEGSEYLLEKIKNEDFLRKQRTFDNGSIPHQVHLTELRAIIRRQSEYYPFLKENLDRIEKILTFRIPYYVGPLAREKSDFAWMTRKTDDSIRPWNFEDLVDKEKSAEAFIHRMTNNDLYLPEEKVLPKHSLIYEKFTVYNELTKVRFLAEGFKDFQFLNRKQKETIFNSLFKEKRKVTEKDIISFLNKVDGYEGIAIKGIEKQFNASLSTYHDLKKILGKDFLDNTDNELILEDIIQTLTLFEDREMIKKRLDIYKDFFTESQLKKLYRRHYTGWGRLSAKLINGIRNKENQKTILDYLIDDGSANRNFMQLIKDAGLSFKPIIDKARTGSHSDNLKEVVGELAGSPAIKKGILQSLKIVDELVKVMGYEPEQIVVEMARENQTTAKGLSRSRQRLTTLRESLGNLKSNILEEKKPKYVKDQVENHHLSDDRLFLYYLQNGKDMYTDDELDIDNLSQYDIDHIIPQAFIKDDSIDNRVLVSSAKNRGKSDDVPSIEIVKARKMFWKNLLDAKLMSQRKYDNLTKAERGGLTSDDKARFIQRQLVETRQITKHVARILDERFNNELDSKGRRIRKVKIVTLKSNLVSNFRKEFGFYKIREVNNYHHAHDAYLNAVVAKAILTKYPQLEPEFVYGLYRRKKLSKIVREDKEEKYSEATRKMFFYSNLMNMFKRVVRLADGSIVVRPVIETGRYMGKTAWDKKKHFATVRKVLSYPQNNIVKKTEIQTGGFSKESILAHGNSDKLIPRKTKDIYLDPKKYGGFDSPIVAYSVLVVADIKKGKAQKLKTVTELLGITIMERSRFEKNTSAFLESKGYLNIRDDKLMILPKYSLFELENGRRRLLASAGELQKGNELALPTQFMKFLYLASRYNESKGKPEEIEKKQEFVNQHVSYFDDILQLINDFSNRVILADANLEKINKLYQDNKENIPVDELANNIINLFTFTSLGAPAAFKFFDKIVDRKRYTSTKEVLNSTLIHQSITGLYETRIDLGKLGEG

SEQ ID NO: 645 - protein, 1370 aa, Streptococcus agalactiae
MNKPYSIGLDIGTNSVGWSIITDDYKVPAKKMRVLGNTDKEYIKKNLIGALLFDGGNTAADRRLKRTARRRYTRRRNRILYLQEIFAEEMSKVDDSFFHRLEDSFLVEEDKRGSKYPIFATMQEEKYYHEKFPTIYHLRKELADKKEKADLRLIYLALAHIIKFRGHFLIEDDRFDVRNTDIQKQYQAFLEIFDTTFENNDLLSQNVDVEAILTDKISKSAKKDRILARYPNQKSTGIFAEFLKLIVGNQADFKKHFNLEDKTPLQFAKDSYDEDLENLLGQIGDEFADLFSAAKKLYDSVLLSGILTVTDLSTKAPLSASMIQRYDEHREDLKQLKQFVKASLPEKYQEIFADSSKDGYAGYIEGKTNQEAFYKYLSKLLTKQEGSEYLLEKIKNEDFLRKQRTFDNGSIPHQVHLTELRAIIRRQSEYYPFLKENLDRIEKILTFRIPYYVGPLAREKSDFAWMTRKTDDSIRPWNFEDLVDKEKSAEAFIHRMTNNDLYLPEEKVLPKHSLIYEKFTVYNELTKVRFLAEGFKDFQFLNRKQKETIFNSLFKEKRKVTEKDIISFLNKVDGYEGIAIKGIEKQFNASLSTYHDLKKILGKDFLDNTDNELILEDIVQTLTLFEDREMIRKRLDIYKDFFTESQLKKLYRRHYTGWGRLSAKLINGIRNKENQKTILDYLIDDGSANRNFMQLIKDAGLSFKPIIDKARTGSHSDNLKEVVGELAGSPAIKKGILQSLKIVDELVKVMGYEPEQIVVEMARENQTTAKGLSRLRQRLTTLRESLANLKSNILEEKKPKYVKDQVENHHLSDDRLFLYYLQNGKDMYTDDELDIDNLSQYDIDHIIPQAFIKDDSIDNRVLVSSAKNRGKSDDVPSVEIVKDCKVFWKKLLDAKLMSQRKYDNLTKAERGGLTSDDKARFIQRQLVETRQITKHVARILDERFNNELDSKGRRIRKVKIVTLKSNLVSNFRKEFGFYKIREVNNYHHAHDAYLNAVVAKAILTKYPQLEPEFVYGDYPKYNSYKTRKSATEKLFFYSNIMNFFKTKVTLADGTVVVKDDIEVNNDTGEIVWDKKKHFATVRKVLSYPQVNIVKKTEIQTGGFSKESILAHGNSDKLIPRKTKDIYLDPKKYGGFDSPIVAYSVLVVADIKKGKAQKLKTVTELLGITIMERSRFEKNPSAFLESKGYLNIRDDKLMILPKYSLFELENGRRRLLASADELQKGNELALPTQFMKFLYLASRYNELKGKPEEIEQKQEFVVQHVSYFDDILQIINDFSNRVILADANLEKINKLYQDNKENIPVDELANNIINLFTFTSLGAPAAFKFFDKIVDRKRYTSTKEVLNSTLIHQSITGLYETRIDLGKLGED

SEQ ID NO: 646 - protein, 1377 aa, Streptococcus agalactiae
MNKPYSIGLDIGTNSVGWSIITDDYKVPAKKMRVLGNTDKEYIKKNLIGALLFDGGNTAADRRLKRTARRRYTRRRNRILYLQEIFAEEMSKVDDSFFHRLEDSFLVEEDKRGSKYPIFATMQEEKYYHEKFPTIYHLRKELADKKEKADLRLVYLALAHIIKFRGHFLIEDDRFDVRNTDIQKQYQAFLEIFDTTFENNHLLSQNVDVEAILTDKISKSAKKDRILAQYPNQKSTGIFAEFLKLIVGNQADFKKHFNLEDKTPLQFAKDSYDEDLENLLGQIGDEFADLFSVAKKLYDSVLLSGILTVTDLSTKAPLSASMIQRYDEHHEDLKHLKQFVKASLPENYREVFADSSKDGYAGYIEGKTNQEAFYKYLLKLLTKQEGSEYFLEKIKNEDFLRKQRTFDNGSIPHQVHLTELRAIIRRQSEYYPFLKENQDRIEKILTFRIPYYVGPLAREKSDFAWMTRKTDDSIRPWNFEDLVDKEKSAEAFIHRMTNNDLYLPEEKVLPKHSLIYEKFTVYNELTKVRFLAEGFKDFQFLNRKQKETIFNSLFKEKRKVTEKDIISFLNKVDGYEGIAIKGIEKQFNASLSTYHDLKKILGKDFLDNTDNELILEDIVQTLTLFEDREMIKKCLDIYKDFFTESQLKKLYRRHYTGWGRLSAKLINGIRNKENQKTILDYLIDDGSANRNFMQLINDDDLSFKPIIDKARTGSHSDNLKEVVGELAGSPAIKKGILQSLKIVDELVKVMGYEPEQIVVEMARENQTTAKGLSRSRQRLTTLRESLANLKSNILEEKKPKYVKDQVENHHLSDDRLFLYYLQNGRDMYTKKALDIDNLSQYDIDHIIPQAFIKDDSIDNRVLVSSAKNRGKSDDVPSIEIVKARKMFWKNLLDAKLMSQRKYDNLTKAERGGLTSDDKARFIQRQLVETRQITKHVARILDERFNNEVDNGKKICKVKIVTLKSNLVSNFRKEFGFYKIREVNDYHHAHDAYLNAVVAKAILTKYPQLEPEFVYGMYRQKKLSKIVHEDKEEKYSEATRKMFFYSNLMNMFKRVVRLADGSIVVRPVIETGRYMGKTAWDKKKHFATVRKVLSYPQNNIVKKTEIQTGGFSKESILAHGNSDKLIPRKTKDIYLDPKKYGGFDSPIVAYSVLVVADIKKGKAQKLKTVTELLGITIMERSRFEKNPSAFLESKGYLNIRDDKLMILPKYSLFELENGRRRLLASAGELQKGNELALPTQFMKFLYLASRYNESKGKPEEIEKKQEFVNQHVSYFDDILQLINDFSKRVILADANLEKINKLYQDNKENIPVDELANNIINLFTFTSLGAPAAFKFFDKIVDRKRYTSTKEVLNSTLIHQSITGLYETRIDLGKLGED

SEQ ID NO: 647 - protein, 1370 aa, Streptococcus agalactiae
  misc_feature (117)..(117): Xaa can be any naturally occurring amino acid
MNKPYSIGLDIGTNSVGWSIITDDYKVPAKKMRVLGNTDKEYIKKNLIGALLFDGGNTAADRRLKRTARRRYTRRRNRILYLQEIFAEEMSKVDDSFFHRLEDSFLVEEDKRGSKYXIFATLQEEKDYHEKFSTIYHLRKELADKKEKADLRLIYIALAHIIKFRGHFLIEDDSFDVRNTDISKQYQDFLEIFNTTFENNDLLSQNVDVEAILTDKISKSAKKDRILAQYPNQKSTGIFAEFLKLIVGNQADFKKYFNLEDKTPLQFAKDSYDEDLENLLGQIGDEFADLFSAAKKLYDSVLLSGILTVIDLSTKAPLSASMIQRYDEHREDLKQLKQFVKASLPEKYQEIFADSSKDGYAGYIEGKTNQEAFYKYLSKLLTKQEDSENFLEKIKNEDFLRKQRTFDNGSIPHQVHLTELKAIIRRQSEYYPFLKENQDRIEKILTFRIPYYIGPLAREKSDFAWMTRKTDDSIRPWNFEDLVDKEKSAEAFIHRMTNNDFYLPEEKVLPKHSLIYEKFTVYNELTKVRYKNEQGETYFFDSNIKQEIFDGVFKEHRKVSKKKLLDFLAKEYEEFRIVDVIGLDKENKAFNASLGTYHDLEKILDKDFLDNPDNESILEDIVQTLTLFEDREMIKKRLENYKDLFTESQLKKLYRRHYTGWGRLSAKLINGIRDKESQKTILDYLIDDGRSNRNFMQLINDDGLSFKSIISKAQAGSHSDNLKEVVGELAGSPAIKKGILQSLKIVDELVKVMGYEPEQIVVEMARENQTTNQGRRNSRQRYKLLDDGVKNLASDLNGNILKEYPTDNQALQNERLFLYYLQNGRDMYTGEALDIDNLSQYDIDHIIPQAFIKDDSIDNRVLVSSAKNRGKSDDVPSLEIVKDCKVFWKKLLDAKLMSQRKYDNLTKAERGGLTSDDKARFIQRQLVETRQITKHVARILDERFNNELDSKGRRIRKVKIVTLKSNLVSNFRKEFGFYKIREVNNYHHAHDAYLNAVVAKAILTKYPQLEPEFVYGDYPKYNSYKTRKSATEKLFFYSNIMNFFKTKVTLADGTVVVKDDIEVNNDTGEIVWDKKKHFATVRKVLSYPQNNIVKKTEIQTGGFSKESILAHGNSDKLIPRKTKDIYLDPKKYGGFDSPIVAYSVLVVADIKKGKAQKLKTVTELLGITIMERSRFEKNPSAFLESKGYLNIRADKLIILPKYSLFELENGRRRLLASAGELQKGNELALPTQFMKFLYLASRYNESKGKPEEIEKKQEFVNQHVSYFDDILQLINDFSKRVILADANLEKINKLYQDNKENISVDELANNIINLFTFTSLGAPAAFKFFDKIVDRKRYTSTKEVLNSTLIHQSITGLYETRIDLGKLGED

SEQ ID NO: 648 - protein, 1370 aa, Streptococcus agalactiae
MNKPYSIGLDIGTNSVGYSVVTDDYKVPAKKMRVLGNTDKEYIKKNLIGALLFDGGNTASDRRLKRTARRRYTRRRNRILYLQEIFAEEMSKVDDSFFHRLEDSFLVEDDKRGSKYPIFATMQEEKDYHEKFPTIYHLRKELADKKEKADLRLVYLALAHIIKFRGHFLIEDDSFDVRNTDIQRQYQAFLEIFDTTFENNHLLSQNIDVEGILTDKISKSAKKDRILAQYPNQKSTGIFAEFLKLIVGNQADFKKHFNLEDKTPLQFAKDSYDEDLENLLGQIGDEFADLFSVAKKLYDSVLLSGILTVTDLSTKAPLSASMIQRYDEHREDLKQLKQFVKASLPEKYQEIFTDSSKDGYAGYIEGKTNQGAFYKYLSKLLTKQEGSEYFLEKIKNEDFLRKQRTFDNGSIPHQVHLTELKAIIRRQSEYYPFLKENLDRIEKILTFRIPYYVGPLAREKSDFAWMTRKTDDSIRPWNFEELVDKEASAEAFIHRMTNNDLYLPEEKVLPKHSLIYEKFTVYNELTKVRYKNEQGETYFFDSNIKQEIFDGVFKEHRKVSKKKLLDFLAKEYEEFRIVDVIGLDKENKAFNASLGTYHDLKKILDKDFLDNPDNESILEDIVQTLTLFEDREMIKKRLENYKDLFTESQLKKLYRRHYTGWGRLSAKLINGIRDKESQKTILDYLISDGRANRNFMQLIHDDGLSFKPIIDKAQAGSHSDNLKEVVGELAGSPAIKKGILQSLKIVDELVKVMGYEPEQVVVEMARENQTTNQGRRNTRQRYKLLEEGVKNLASDLNGNILKEYPTDNQALQNERLFLYYLQNGRDMYTGEALDIDNLSQYDIDHIVPQAFIKDDSIDNRVLVSSAKNRGKSDNVPSIDIVKARKAFWKKLLDAKLMSQRKYDNLTKAERGGLTSDDKARFIQRQLVETRQITKHVARILDERFNNELDSKGRRIRKVKIVTLKSNLVSNFRKEFGFYKIREVNDYHHAHDAYLNAVVAKAILTKYPQLEPEFVYGDYPKYNSYKTRKSATEKLFFYSNIMNFFKTKVTLADGTVVVKDDIEVNNDTGEIVWDKKKHFATVRKVLSYPQVNIVKKTEIQTGGFSKESILAHGNSDKLIPRKTKDIYLDPKKYGGFDSPIVAYSVLVVADIKKGKAQKLKTVTELLGITIMERFRFEKNPSAFLESKGYLNIRDDKLMILPKYSLFELENGRRRLLASAGELQKGNELALPTQYMKFLYLASRYNELKGKPEEIEQKQEFVVQHVSYFDDILQIINDFSNRVILADANLEKINKLYQDNKENISVDELANNIINLFTFTSLGAPAAFKFFDKIVDRKRYTSTKEVLNSTLIHQSITGLYETRIDLGKLGED

SEQ ID NO: 649 - protein, 1370 aa, Streptococcus agalactiae
MNKPYSIGLDIGTNSVGYSVVTDDYKVPAKKMRVLGNTDKEYIKKNLIGALLFDGGNTASDRRLKRTARRRYTRRRNRILYLQEIFAEEMSKVDDSFFHRLEDSFLVEDDKRGSKYPIFATMQEEKDYHEKFPTIYHLRKELADKKEKANLRLVYLALAHIIKFRGHFLIEDDSFDVRNTDIQRQYQAFLEIFDTTFENNHLLSQNIDVEGILTDKISKSAKKDRILAQYPNQKSTGIFAEFLKLIVGNQADFKKHFNLEDKTPLQFAKDSYDEDLENLLGQIGDEFADLFSVAKKLYDSVLLSGILTVTDLSTKAPLSASMIQRYDEHREDLKQLKQFVKASLPEKYQEIFTDSSKDGYAGYIEGKTNQGAFYKYLSKLLTKQEGSEYFLEKIKNEDFLRKQRTFDNGSIPHQVHLTELKAIIRRQSEYYPFLKENLDRIEKILTFRIPYYVGPLAREKSDFAWMTRKTDDSIRPWNFEELVDKEASAEAFIHRMTNNDLYLPEEKVLPKHSLIYEKFTVYNELTKVRYKNEQGETYFFDSNIKQEIFDGVFKEHRKVSKKKLLDFLAKEYEEFRIVDVIGLDKENKAFNASLGTYHDLKKILDKDFLDNPDNESILEDIVQTLTLFEDREMIKKRLENYKDLFTESQLKKLYRRHYTGWGRLSAKLINGIRDKESQKTILDYLISDGRANRNFMQLIHDDGLSFKPIIDKAQAGSHSDNLKEVVGELAGSPAIKKGILQSLKIVDELVKVMGYEPEQVVVEMARENQTTNQGRRNTRQRYKLLEEGVKNLASDLNGNILKEYPTDNQALQNERLFLYYLQNGRDMYTGEALDIDNLSQYDIDHIVPQAFIKDDSIDNRVLVSSAKNRGKSDNVPSIDIVKARKAFWKKLLDAKLMSQRKYDNLTKAERGGLTSDDKARFIQRQLVETRQITKHVARILDERFNNELDSKGRRIRKVKIVTLKSNLVSNFRKEFGFYKIREVNDYHHAHDAYLNAVVAKAILTKYPQLEPEFVYGDYPKYNSYKTRKSATEKLFFYSNIMNFFKTKVTLADGTVVVKDDIEVNNDTGEIVWDKKKHFATVRKVLSYPQVNIVKKTEIQTGGFSKESILAHGNSDKLIPRKTKDIYLDPKKYGGFDSPIVAYSVLVVADIKKGKAQKLKTVTELLGITIMERFRFEKNPSAFLESKGYLNIRDDKLMILPKYSLFELENGRRRLLASAGELQKGNELALPTQYMKFLYLASRYNELKGKPEEIEQKQEFVVQHVSYFDDILQIINDFSNRVILADANLEKINKLYQDNKENISVDELANNIINLFTFTSLGAPAAFKFFDKIVDRKRYTSTKEVLNSTLIHQSITGLYETRIDLGKLGED

SEQ ID NO: 650 - protein, 1370 aa, Streptococcus agalactiae
  misc_feature (9)..(9): Xaa can be any naturally occurring amino acid
MNKPYSIGXDIGTNSVGWSIITDDYKVPAKKMRVLGNTDKEYIKKNLIGALLFDGGNTAADRRLKRTARRRYTRRRNRILYLQEIFAEEMSKVDDSFFHRLEDSFLVEEDKRGSKYPIFATLQEEKDYHEKFSTIYHLRKELADKKEKADLRLIYIALAHIIKFRGHFLIEDDSFDVRNTDISKQYQDFLEIFNTTFENNDLLSQNVDVEAILTDKISKSAKKDRILAQYPNQKSTGIFAEFLKLIVGNQADFKKYFNLEDKTPLQFAKDSYDEDLENLLGQIGDEFADLFSAAKKLYDSVLLSGILTVIDLSTKAPLSASMIQRYDEHREDLKQLKQFVKASLPEKYQEIFADSSKDGYAGYIEGKTNQEAFYKYLSKLLTKQEDSENFLEKIKNEDFLRKQRTFDNGSIPHQVHLTELKAIIRRQSEYYPFLKENQDRIEKILTFRIPYYIGPLAREKSDFAWMTRKTDDSIRPWNFEDLVDKEKSAEAFIHRMTNNDFYLPEEKVLPKHSLIYEKFTVYNELTKVRYKNEQGETYFFDSNIKQEIFDGVFKEHRKVSKKKLLDFLAKEYEEFRIVDVIGLDKENKAFNASLGTYHDLEKILDKDFLDNPDNESILEDIVQTLTLFEDREMIKKRLENYKDLFTESQLKKLYRRHYTGWGRLSAKLINGIRDKESQKTILDYLIDDGRSNRNFMQLINDDGLSFKSIISKAQAGSHSDNLKEVVGELAGSPAIKKGILQSLKIVDELVKVMGYEPEQIVVEMARENQTTNQGRRNSRQRYKLLDDGVKNLASDLNGNILKEYPTDNQALQNERLFLYYLQNGRDMYTGEALDIDNLSQYDIDHIIPQAFIKDDSIDNRVLVSSAKNRGKSDDVPSLEIVKDCKVFWKKLLDAKLMSQRKYDNLTKAERGGLTSDDKARFIQRQLVETRQITKHVARILDERFNNELDSKGRRIRKVKIVTLKSNLVSNFRKEFGFYKIREVNNYHHAHDAYLNAVVAKAILTKYPQLEPEFVYGDYPKYNSYKTRKSATEKLFFYSNIMNFFKTKVTLADGTVVVKDDIEVNNDTGEIVWDKKKHFATVRKVLSYPQNNIVKKTEIQTGGFSKESILAHGNSDKLIPRKTKDIYLDPKKYGGFDSPIVAYSVLVVADIKKGKAQKLKTVTELLGITIMERSRFEKNPSAFLESKGYLNIRADKLIILPKYSLFELENGRRRLLASAGELQKGNELALPTQFMKFLYLASRYNESKGKPEEIEKKQEFVNQHVSYFDDILQLINDFSKRVILADANLEKINKLYQDNKENISVDELANNIINLFTFTSLGAPAAFKFFDKIVDRKRYTSTKEVLNSTLIHQSITGLYETRIDLGKLGED

SEQ ID NO: 651 - protein, 1125 aa, Streptococcus anginosus
MNGLVLGLDIGIASVGVGILNKETGEIIHANSRIFPAATADSNVERRGFRQGRRLGRRKKHRSARLNNLFEEFGFITDFSAIPLNLNPYALRVKGLSEELTNEELFIALKNIIKRRGISYLDDASEDGETASNEYGKAVEENRKLLADKTPGQIQLERFEKYGQVRGDFTVVENGENHRLINVFSTSAYKKEAERILRRQQEFNVRISDEFIEAYLTILTGKRKYYHGPGNEKSRTDYGRFRTDGTTLDNIFGILIGKCTFYPDEYRAAKASYTAQEFNLLNDLNNLTVPTETKKLSPEQKRQIVEYARTAKTLGTPTLLKYIAKLVDGSIDDIKGYRIDKSDKPEMHTFDAYRKMRTLDLVNIDALSRETLDDLAHILTLNTESEGILEALNSKMPSTFTKEQIDELIQFRKKNSAVFGKGWHNFSLKLMNELISELYETSEEQMTILTRLGKQRSREISKRTKYIDEKELTEEIYNPVVAKSVRQAIKIINEATKRYGIFDNIVIEMARENNEEDAKKDYIKRQKANQDEKNASMEKAAFQYNGKKELPDSIFHGHKELATKIRLWHQQGERCLYTGKNISIRDLIHNPHQYEIDHILPLSLSFDDGLANKVLVLATANQEKGQRTPFQAIDSMDDAWSYREFKQYVRNSKSLSNKKKDYLLTEEDISKIEVKQKFIERNLVDTRYSSRVVLNTLQEFYKTNDFDTKISVVRGQFTSQLRRKWKIEKSRDTYHHHAVDALIIAASSQLRLWKKQNNPLISYKEGQFVDPETGEILSLTDDEYKELVFRPPYDYFVDTLKSKSFEDSILFSYQVDSKYNRKISDATIYGTRKAQLGKDKQEETYVLGKIKDIYSQKGYEDFIKRYNKDETQFLIYHKDPQTFEKVIEEILKTYPDKELNEKGKEIPCNPFEKYRQENGPIRKYSKKGKGPEIKSLKYYDNKLGNHIDITPVNSQNQVVLQSLKPWRTDVYFNPRTSKYELMGLKYSDLRFEKGSGSYGISPEKYNKVKAKEGVNEDSEFKFTLYKNDLILIKDTETGEQQLFRYGSRNDTSKHYVELKPYEKAKFEGNQQLMNLLGTVAKGGQCLKGINKPNLSIYKVKTDVLGNKYFIKKEGDQPQLNFKKKF

SEQ ID NO: 652 - protein, 1386 aa, Streptococcus anginosus
MNQKYSIGLDIGTNSVGWAVITDDYKVPAKKMKVLGNTDKQSIKKNLLGALLFDSGETAEATRLKRTARRRYTRRRNRLRYLQEIFAEEMMQVDESFFQRLDDSFLVDEDKRGERHPIFGNIAAEVKYHDEFPTIYHLRKHLADISQKADLRLVYLALAHMIKFRGHFLIEGQLKAENTNVQALFKDFVEVYDKTVEESHLSEITVDALSILTEKVSKSRRLENLIAHYPAEKKNTLFGNLIALFLGLQPNFKTNFQLSEDAKLQFSKDTYEEDLEGLLGEVGDEYADLFASAKNLYDAILLSGILTVDDNSTKAPLSASMVKRYEEHQKDLKKFEDFIKVNALDQYNAIFKDKNKKGYAGYIESGVKQDEFYKYLKGILLQINGSGDFLDKIDREDFLRKQRTFDNGSIPHQIHLQEMHAILRRQGEHYPFLKENQDKIEKILTFRIPYYVGPLARKGSRFAWAEYKADEKITPWNFDDILDKEKSAEKFITRMTLNDLYLPEEKVLPKHSLLYETFTVYNELTKVKYVNEQGEAKFFDANMKQEIFDHVFKENRKVTKDKLLNYLNKEFEEFRIVNLTGLDKENKVFNSSLGTYHDLRKILNKSFLDNKENAQIIEDIIQTLTLFEDREMIRQRLQKYSDIFTKAQLKKLERRHYTGWGRLSYKLINGIRNKENKKTILDYLIDDGYANRNFMQLINDDALSFKEEIAKAQIIGDVDDIANVVHDLPGSPAIKKGILQSVKIVDELVKVMGHNPANIIIEMARENQTTDRGRRNSQQRLKLLQDSLKNLDNPVNIKNVENQQLQNDRLFLYYIQNGKDMYTGETLDINNLSQYDIDHIIPQAYIKDDSFDNRVLTSSSENRGKSDNVPSIEVVCARKADWMRLRKAGLISQRKFDNLTKAERGGLTENDKAGFIKRQLVETRQITKHVAQVLDARFNAKHDENKKVIRDVKIITLKSNLVSQFRKDFKFYKVREINDYHHAHDAYLNAVIGTALLKKYPKLASEFVYGEFKKYDVRKFIAKSDKEIGKATAKYFFYSNLMNFFKKEVKFADGTVVERPDIETSEDGEIAWNKQTDFKIVRKVLSYPQVNIVKKTEVQTHGLDRGKPRGLFNANPSPKPKPDSSENLVGVKRNLDPKKYGGYAGISNSYAVLVKAIIEKGVKKKETMVLEFQGISILDRITFEKDKRAFLLGKGYKDIKKIIELPKYSLFELKDGSRRMLASILSTNNKRGEIHKGNELFVPQKFTTLLYHAKRINNPINKDHIEYVKKHRDDFKELLNYVLEFNEKYVGATKNGERLKEAVADFDSKSNEEICTSFLGAVNSKNAGLFELTSLGSASDFEFLGVKIPRYRDYTPSSLLKDSTLIHQSITGLYETRIDLSKLGED

SEQ ID NO: 653 - protein, 1396 aa, Streptococcus anginosus
MTKPYSIGLDIGTNSVGWAVITDDYKVPAKKMKVLGNTNRDYIKKNLLGALLFDGGETAEGRRLKRTARRRYTRRKNRLRYLQEIFAEEMMQVDESFFQRLDDSFLVEEDKQGSKYPIFGTLKEEKEYHKKFKTIYHLREELANSKEKADLRLVYLALAHMIKFRGHFLYEGDLKAENTDVQALFKDFVEEYDKTIEESHLSEITVDALSILTEKVSKSSRLENLIAHYPTEKKNTLFGNLIALSLGLQANFKTNFQLSEDAKLQFSKDTYEEDLEGLLGEVGDEYADLFVSAKNLYDAILLSGILTVDDNSTKAPLSASMVKRYKEHKEELAAFKRFIKEKLPKKYEEIFKDDTKNGYAGYVGADKKLRKRSGKLATEEEFYKYVKGILNKVEGADYFLDKIDREDFLRKQRTFDNGSIPHQIHLQEMHAILRRQGEHYPFLKENQDKIEKILTFRIPYYVGPLARKGSRFAWAEYKADEKITPWNFDDILDKEKSAEKFITRMTLNDLYLPEEKVLPKHSPLYETFTVYNELTKVKYVNEQGEAKFFDTNMKQEIFDHVFKENRKVTKDKLLNYLNKEFEEFRIVNLTGLDKENKAFNASLGTYHDLRKILDKSFLDDKVNEKIIEDIIQTLTLFEDREMIRQRLQKYSDIFTTQQLKELERRHYTGWGRLSYKLINGIRNKENKKTILDYLIDDGYANRNFMQLINDDALSFKEEIARAQIIGDVDDIANVVHDLPGSPAIKKGILQSVKIVDELVKVMGHNPTNIIIEMARENQTTDKGRRNSQQRLKLLQDSLKNLDNPVNIKNVENQQLQNDRLFLYYIQNGKDMYTGETLDINNLSQYDIDHIIPQAFIKDNSLDNRVLTRSDKNRGKSDDVPSIEVVHEMKSFWSKLLSVKLITQRKFDNLTKAERGGLTENDKAGFIKRQLVETRQITKHVAQVLDARFNAKHDENKKVIRDVKIITLKSNLVSQFRKDFKFYKVREINDYHHAHDAYLNAVIGTALLKKYPKLASEFVYGEFKKYDVRKFIAKSDKEIGKATAKYFFYSNLMNFFKKEVKFADGTVVERPDIETSEDGEIAWNKQTDFKIVRKVLSYPQVNIVKKTEVQTHGLDRGKPRGLFNANPSPKPKPDSSENLVGIKRNLDPKKYGGYAGISNSYAVLVKAIIEKGVKKKETMVLEFQGISILDRITFEKDKRAFLLGKGYKDIKKIIELPKYSLFELKDGSRRMLASILSTNNKRGEIHKGNELFVPQKFTTLLYHAKRINNPINKDHIEYVKKHRDDFKELLNYVLEFNEKYVGATKNGERLKEAVADFDSKSNEEICTSFLGAVNSKNAGLFELTSLGSASDFEFLGVKIPRYRDYTPSSLLKDSILIHQSITGLYETRIDLSKLGED

SEQ ID NO: 654 - protein, 1375 aa, Streptococcus canis
MEKKYSIGLDIGTNSVGWAVITDDYKVPSKKFKVLGNTNRKSIKKNLMGALLFDSGETAEATRLKRTARRRYTRRKNRIRYLQEIFANEMAKLDDSFFQRLEESFLVEEDKKNERHPIFGNLADEVAYHRNYPTIYHLRKKLADSPEKADLRLIYLALAHIIKFRGHFLIEGKLNAENSDVAKLFYQLIQTYNQLFEESPLDEIEVDAKGILSARLSKSKRLEKLIAVFPNEKKNGLFGNIIALALGLTPNFKSNFDLTEDAKLQLSKDTYDDDLDELLGQIGDQYADLFSAAKNLSDAILLSDILRSNSEVTKAPLSASMVKRYDEHHQDLALLKTLVRQQFPEKYAEIFKDDTKNGYAGYVGIGIKHRKRTTKLATQEEFYKFIKPILEKMDGAEELLAKLNRDDLLRKQRTFDNGSIPHQIHLKELHAILRRQEEFYPFLKENREKIEKILTFRIPYYVGPLARGNSRFAWLTRKSEEAITPWNFEEVVDKGASAQSFIERMTNFDEQLPNKKVLPKHSLLYEYFTVYNELTKVKYVTERMRKPEFLSGEQKKAIVDLLFKTNRKVTVKQLKEDYFKKIECFDSVEIIGVEDRFNASLGTYHDLLKIIKDKDFLDNEENEDILEDIVLTLTLFEDREMIEERLKTYAHLFDDKVMKQLKRRHYTGWGRLSRKMINGIRDKQSGKTILDFLKSDGFSNRNFMQLIHDDSLTFKEEIEKAQVSGQGDSLHEQIADLAGSPAIKKGILQTVKIVDELVKVMGHKPENIVIEMARENQTTTKGLQQSRERKKRIEEGIKELESQILKENPVENTQLQNEKLYLYYLQNGRDMYVDQELDINRLSDYDVDHIVPQSFIKDDSIDNKVLTRSVENRGKSDNVPSEEVVKKMKNYWRQLLNAKLITQRKFDNLTKAERGGLSEADKAGFIKRQLVETRQITKHVARILDSRMNTKRDKNDKPIREVKVITLKSKLVSDFRKDFQLYKVRDINNYHHAHDAYLNAVVGTALIKKYPKLESEFVYGDYKVYDVRKMIAKSEQEIGKATAKRFFYSNIMNFFKTEVKLANGEIRKRPLIETNGETGEVVWNKEKDFATVRKVLAMPQVNIVKKTEVQTGGFSKESILSKRESAKLIPRKKGWDTRKYGGFGSPTVAYSILVVAKVEKGKAKKLKSVKVLVGITIMEKGSYEKDPIGFLEAKGYKDIKKELIFKLPKYSLFELENGRRRMLASATELQKANELVLPQHLVRLLYYTQNISATTGSNNLGYIEQHREEFKEIFEKIIDFSEKYILKNKVNSNLKSSFDEQFAVSDSILLSNSFVSLLKYTSFGASGGFTFLDLDVKQGRLRYQTVTEVLDATLIYQSITGLYETRTDLSQLGGD

SEQ ID NO: 655 - protein, 1345 aa, Streptococcus constellatus
MGKPYSIGLDIGTNSVGWAVVTDDYKVPAKKMKVLGNTDKQSIKKNLLGALLFDSGETAEATRLKRTARRRYTRRKNRLRYLQEIFTGEMNKVDENFFQRLDDSFLVDEDKRGEHHPIFGNIAAEVKYHDDFPTIYHLRRHLADTSKKADLRLVYLALAHMIKFRGHFLYEGDLKAENTDVQALFKDFVEEYDKTIEESHLSEITVDALSILTEKVSKSSRLENLIAHYPTEKKNTLFGNLIALSLDLHPNFKTNFQLSEDAKLQFSKDTYEEDLEGFLGEVGDEYADLFASAKNLYDAILLSGILTVDDNSTKAPLSASMVKRYEEHQKDLKKLKDFIKVNAPDQYNAIFKDKNKKGYASYIESGVKQDEFYKYLKGILLKINGSGDFLDKIDREDFLRKQRTFDNGSIPHQIHLQEMHAILRRQGEHYPFLKENQDKIEKILTFRIPYYVGPLARKGSRFAWAEYKADEKITPWNFDDILDKEKSAEKFITRMTLNDLYLPEEKVLPKHSPLYEAFTVYNELTKVKYVNEQGEAKFFDTNMKQEIFDHVFKENRKVTKDKLLNYLNKEFEEFRIVNLTGLDKENKAFNSSLGTYHDLRKILDKSFLDDKANEKTIEDIIQTLTLFEDREMIRQRLQKYSDIFTKAQLKKLERRHYTGWGRLSYKLINGIRNKENKKTILDYLIDDGYANRNFMQLINDDALSFKEEIARAQIIDDVDDIANVVHDLPGSPAIKKGILQSVKIVDELVKVMGHNPANIIIEMARENQTTDKGRRNSQQRLKLLQDSLKNLDNPVNIKNVENQQLQNDRLFLYYIQNGKDMYTGETLDINNLSQYDIDHIIPQAFIKDNSLDNRVLTRSDKNRGKSDDVPSIEVVHEMKSFWSKLLSVKLITQRKFDNLTKAERGGLTEEDKAGFIKRQLVETRQITKHVAQILDERFNTEFDGNKRRIRNVKIITLKSNLVSNFRKEFELYKVREINDYHHAHDAYLNAVVGNALLLKYPQLEPEFVYGEYPKYNSYRSRKSATEKFLFYSNILRFFKKEDIQTNEDGEIAWNKEKHIKILRKVLSYPQVNIVKKTEEQTGGFSKESILPKGESDKLIPRKTKNSYWDPKKYGGFDSPVVAYSILVFADVEKGKSKKLRKVQDMVGITIMEKKRFEKNPVDFLEQRGYRNVRLEKIIKLPKYSLFELENKRRRLLASAKELQKGNELVIPQRFTTLLYHSYRIEKDYEPEHREYVEKHKDEFKELLEYISVFSRKYVLADNNLTKIEMLFSKNKDAEVSSLAKSFISLLTFTAFGAPAAFNFFGENIDRKRYTSVTECLNATLIHQSITGLYETRIDLSKLGED

SEQ ID NO: 656 - protein, 538 aa, Streptococcus dysgalactiae
DYDVDHIVPQSFIKDDSIDNKVLTRSDKNRGKSDNVPSEEVVKKMKNYWRQLLNAKLITQRKFDNLTKAERGGLSELDKAGFIKRQLVETRQITKHVAQILDSRMNTKYDENDKLIREVKVITLKSKLVSDFRKDFQFYKVREINNYHHAHDAYLNAVVGTALIKKYPKLESEFVYGDYKVYDVRKMIAKSEQEIGKATAKRFFYSNIMNFFKTEITLANGEIRKRPLIETNEETGEIVWDKGRDFATVRKVLSMPQVNIVKKTEVQTGALTNESIYARGSFDKLISRKHRFESSKYGGFGSPTVTYSVLVVAKSKVQDGKVKKIKTGKELIGITLLDKLVFEKNPLKFIEDKGYGNVQIDKCIRLPKYSLFEFENGTRRMLASVMANNNSRGDLQKANEMFLPAKLVTLLYHAHKIESSKELEHEAYILDHYNDLYQLLSYIERFASLYVDVEKNISKVKELFSNIESYSISEICSSVINLLTLTASGAPADFKFLGTTIPRKRYGSPQSILSSTLIHQSITGLYETRIDLSQLGGD

SEQ ID NO: 657 - protein, 1155 aa, Streptococcus dysgalactiae
MDKKYSIGLDIGTNSVGWAVITDDYKVPSKKFKVLGNTDRHSIKKNLIGALLFDSGETAEATRLKRSARRRYTRRKNRIRYLQEIFSSEMSKVDDSFFHRLEESFLVEEDKKHERHPIFGNIVDEVAYHEKYPTIYHLRKKLADSTDKADLRLIYLALAHMIKFRGHFLIEGDLNPDNSDMDKLFIQLVQTYNQLFEENPINASRVDAKAILSARLSKSRRLENLIAQLPGEKRNGLFGNLIALSLGLTPNFKSNFDLAEDAKLQLSKDTYDDDLDNLLAQIGDQYADLFLAAKNLSDAILLSDILRVNSEITKAPLSASMIKRYDEHHQDLTLLKALVRQQLPEKYKEIFFDQSKNGYAGYIDGGASQEEFYKFIKPILEKMDGTEELLAKLNREDLLRKQRTFDNGSIPHQIHLGELHAILRRQEDFYPFLKDNREKIEKILTFRIPYYVGPLARGNSRFAWMTRKSEETITPWNFEEVVDKGASAQSFIERMTNFDKNLPNEKVLPKHSLLYEYFTVYNELTKVKYVTEGMRKPEFLSGKQKEAIVDLLFKTNRKVTVKQLKEDYFKKIECFDSVEISGVEDRFNASLGTYHDLLKIIKDKDFLDNEENEDILEDIVLTLTLFEDKEMIEERLKTYAHLFDDKVMKQLKRRHYTGWGRLSRKLINGIRDKQSGKTILDFLKSDGFANRNFIQLIHDDSLTFKEAIQKAQVSGQGHSLHEQIANLAGSPAIKKGILQSVKVVDELVKVMGHKPENIVIEMARENQTTQKGQKNSRERMKRIEEGIKELGSQILKEHPVENTQLQNEKLYLYYLQNRRDMYVDQELDINRLSDYDVDHIVPQSFIKDDSIDNKVLTRSDKNRGKSDDVPSEEVVKKMKNYWRQLLNAKLITQRKFDNLTKAERGGLSELDKAGFIKRQLVETRQITKHVAQILDSRMNTKYDENDKLIREVKVITLKSKLVSDFRKDFQFYKVREINNYHHAHDAYLNAVVGTALIKKYPKLESEFVYGDYKVYDVRKMIAKSEQEIGKATAKRFFYSNIMNFFKTEITLANGEIRKRPLIETNEETGEIVWDKGRDFATVRKVLSMPQVNIVKKTEVQTGALTNESIYARGSFDKLISRKHRFESSKYGGFGSPTVTYSVLVVAKYQSYKMEK

SEQ ID NO: 658 - protein, 1371 aa, Streptococcus dysgalactiae
MDKKYSIGLDIGTNSVGWAVITDDYKVPSKKFKVLGNTDRHSIKKNLIGALLFDSGETAEATRLKRTARRRYTRRKNRIRYLQEIFSSEMSKVDDSFFHRLEESFLVEEDKKHERHPIFGNIVDEVAYHEKYPTIYHLRKKLADSTDKADLRLIYLALAHMIKFRGHFLIEGDLNPDNSDMDKLFIQLVQTYNQLFEENPINASRVDAKAILSARLSKSRRLENLIAQLPGEKRNGLFGNLIALSLGLTPNFKSNFDLAEDAKLQLSKDTYDDDLDNLLAQIGDQYADLFLAAKNLSDAILLSDILRVNSEITKAPLSASMIKRYDEHHQDLTLLKALVRQQLPEKYKEIFFDQSKNGYAGYIDGGASQEEFYKFIKPILEKMDGTEELLAKLNREDLLRKQRTFDNGSIPHQIHLGELHAILRRQEDFYPFLKDNREKIEKILTFRIPYYVGPLARGNSRFAWMTRKSEETITPWNFEEVVDKGASAQSFIERMTNFDKNLPNEKVLPKHSLLYEYFTVYNELTKVKYVTEGMRKPEFLSGKQKEAIVDLLFKTNRKVTVKQLKEDYFKKIECFDSVEISGVEDRFNASLGTYHDLLKIIKDKDFLDNEENEDILEDIVLTLTLFEDKEMIEERLKTYAHLFDDKVMKQLKRRHYTGWGRLSRKLINGIRDKQSGKTILDFLKSDGFANRNFIQLIHDDSLTFKEAIQKAQVSGQGHSLHEQIANLAGSPAIKKGILQSVKVVDELVKVMGHKPENIVIEMARENQTTQKGQKNSRERMKRIEEGIKELGSQILKEHPVENTQLQNEKLYLYYLQNGRDMYVDQELDINRLSDYDVDHIVPQSFIKDDSIDNKVLTRSDKNRGKSDDVPSEEVVKKMKNYWRQLLNAKLITQRKFDNLTKAERGGLSELDKAGFIKRQLVETRQITKHVAQILDSRMNTKYDENDKLIREVKVITLKSKLVSDFRKDFQFYKVREINNYHHAHDAYLNAVVGTALIKKYPKLESEFVYGDYKVYDVRKMIAKSEQEIGKATAKRFFYSNIMNFFKTEITLANGEIRKRPLIETNEETGEIVWNKGRDFATVRKVLSMPQVNIVKKTEVQTGALTNESIYARGSFDKLISRKHRFESSKYGGFGSPTVTYSVLVVAKSKVQDGKVKKIKTGKELIGITLLDKLVFEKNPLKFIEDKGYGNVQIDKCIKLPKYSLFEFENGTRRMLASVMANNNSRGDLQKANEMFLPAKLVTLLYHAHKIESSKELEHEAYILDHYNDLYQLLSYIERFASLYVDVEKNISKVKELFSNIESYSISEICSSVINLLTLTASGAPADFKFLGTTIPRKRYGSPQSILSSTLIHQSITGLYETRIDLSQLGGD

SEQ ID NO: 659 - protein, 1371 aa, Streptococcus dysgalactiae
MDKKYSIGLDIGTNSVGWAVITDDYKVPSKKFKVLGNTDRHSIKKNLIGALLFDSGETAEATRLKRTARRRYTRRKNRIRYLQEIFSSEMSKVDDSFFHRLEESFLVEEDKKHERHPIFGNIVDEVAYHEKYPTIYHLRKKLADSTDKADLRLIYLALAHMIKFRGHFLIEGDLNPDNSDMDKLFIQLVQTYNQLFEENPINASRVDAKAILSARLSKSRRLENLIAQLPGEKRNGLFGNLIALSLGLTPNFKSNFDLAEDAKLQLSKDTYDDDLDNLLAQIGDQYADLFLAAKNLSDAILLSDILRVNSEITKAPLSASMIKRYDEHHQDLTLLKALVRQQLPEKYKEIFFDQSKNGYAGYIDGGASQEEFYKFIKPILEKMDGTEELLAKLNREDLLRKQRTFDNGSIPHQIHLGELHAILRRQEDFYPFLKDNREKIEKILTFRIPYYVGPLARGNSRFAWMTRKSEETITPWNFEEVVDKGASAQSFIERMTNFDKNLPNEKVLPKHSLLYEYFTVYNELTKVKYVTEGMRKPEFLSGKQKEAIVDLLFKTNRKVTVKQLKEDYFKKIECFDSVEISGVEDRFNASLGTYHDLLKIIKDKDFLDNEENEDILEDIVLTLTLFEDKEMIEERLKKYANLFDDKVMKQLKRRHYTGWGRLSRKLINGIRDKQSGKTILDFLKSDGFANRNFMQLINDDSLTFKEAIQKAQVSGQGHSLHEQIANLAGSPAIKKGILQSVKVVDELVKVMGHKPENIVIEMARENQTTQKGQKNSRERMKRIEEGIKELGSQILKEHPVENTQLQNEKLYLYYLQNGRDMYVDQELDINRLSDYDVDHIVPQSFIKDDSIDNKVLTRSDKNRGKSDNVPSEEVVKKMKNYWRQLLNAKLITQRKFDNLTKAERGGLSELDKAGFIKRQLVETRQITKHVAQILDSRMNTKYDENDKLIREVKVITLKSKLVSDFRKDFQFYKVREINNYHHAHDAYLNAVVGTALIKKYPKLESEFVYGDYKVYDVRKMIAKSEQEIGKATAKRFFYSNIMNFFKTEITLANGEIRKRPLIETNEETGEIVWDKGRDFATVRKVLSMPQVNIVKKTEVQTGALTNESIYARGSFDKLISRKHRFESSKYGGFGSPTVTYSVLVVAKSKVQDGKVKKIKTGKELIGITLLDKLVFEKNPLKFIEDKGYGNVQIDKCIKLPKYSLFEFENGTRRMLASVMANNNSRGDLQKANEMFLPAKLVTLLYHAHKIESSKELEHEAYILDHYNDLYQLLSYIERFASLYVDVEKNISKVKELFSNIESYSISEICSSVINLLTLTASGAPADFKFLGTTIPRKRYGSPQSILSSTLIHQSITGLYETRIDLSQLGGD

SEQ ID NO: 660 - protein, 1371 aa, Streptococcus dysgalactiae
MDKKYSIGLDIGTNSVGWAVITDDYKVPSKKFKVLGNTDRHSIKKNLIGALLFDSGETAEATRLKRTARRRYTRRKNRIRYLQEIFSSEMSKVDDSFFHRLEESFLVEEDKKHERHPIFGNIVDEVAYHEKYPTIYHLRKKLADSTDKADLRLIYLALAHMIKFRGHFLIEGDLNPDNSDVDKLFIQLVQTYNQLFEEKPINASGVDAKAILSARLSKSKRLENLIAQLPGEKKNGLFGNLIALSLGLTPNFKSNFDLAEDAKLQLSKDTYDDDLDNLLAQIGNQYADLFLAAKNLSDAILLSDILRVNSEITKAPLSASMIKRYDEHHQDLTLLKALVRQQLPEKYKEIFFDQSKNGYAGYIDGGASQEEFYKFIKPILEKMDGTEELLAKLNREDLLRKQRTFDNGSIPHQIHLGELHAILRRQEDFYPFLKDNREKIEKILTFRIPYYVGPLARGNSRFAWMTRKSEETITPWNFEEVVDKGASAQSFIERMTNFDKNLPNEKVLPKHSLLYEYFTVYNELTKVKYVTEGMRKPEFLSGKQKEAIVDLLFKTNRKVTVKQLKEDYFKKIECFDSVEISGVEDRFNASLGTYHDLLKIIKDKDFLDNEENEDILEDIVLTLTLFEDKEMIEERLKKYANLFDDKVMKQLKRRHYTGWGRLSRKLINGIRDKQSGKTILDFLKSDGFANRNFMQLINDDSLTFKEAIQKAQVSGQGHSLHEQIANLAGSPAIKKGILQSVKVVDELVKVMGHKPENIVIEMARENQTTQKGQKNSRERMKRIEEGIKELGSQILKEHPVENTQLQNEKLYLYYLQNGRDMYVDQELDINRLSDYDVDHIVPQSFIKDDSIDNKVLTRSDKNRGKSDNVPSEEVVKKMKNYWRQLLNAKLITQRKFDNLTKAERGGLSELDKAGFIKRQLVETRQITKHVAQILDSRMNTKYDENDKLIREVKVITLKSKLVSDFRKDFQFYKVREINNYHHAHDAYLNAVVGTALIKKYPKLESEFVYGDYKVYDVRKMIAKSEQEIGKATAKRFFYSNIMNFFKTEITLANGEIRKRPLIETNEETGEIVWDKGRDFATVRKVLSMPQVNIVKKTEVQTGALTNESIYARGSFDKLISRKHRFESSKYGGFGSPTVTYSVLVVAKSKVQDGKVKKIKTGKELIGITLLDKLVFEKNPLKFIEDKGYGNVQIDKCIKLPKYSLFEFENGTRRMLASVMANNNSRGDLQKANEMFLPAKLVTLLYHAHKIESSKELEHEAYILDHYNDLYQLLSYIERFASLYVDVEKNISKVKELFSNIESYSISEICSSVINLLTLTASGAPADFKFLGTTIPRKRYGSPQSILSSTLIHQSITGLYETRIDLSQLGGD

SEQ ID NO: 661 - protein, 1370 aa, Streptococcus gallolyticus; identical to SEQ ID NO: 209

SEQ ID NO: 662 - protein, 1375 aa, Streptococcus infantarius
MEKSYSIGLDIGTNSVGWAVITDDYKVPAKKMKVLGNTDKKYIKKNLLGALLFDSGETAEVTRLKRTARRRYTRRKNRLRYLQEIFAKEMTKVDESFFQRLEESFLTDDDKTFDSHPIFGNKAEEDAYHQKFPTIYHLRKYLADSQEKADLRLVYLALAHMIKYRGHFLIEGELNAENTDVQKLFNVFVETYDKIVDESHLSEIEVDASSILTEKVSKSRRLENLIKQYPTEKKNTLFGNLIALALGLQPNFKTNFKLSEDAKLQFSKDTYEEDLEELLGKVGDDYADLFISAKNLYDAILLSGILTVDDNSTKAPLSASMIKRYVEHHEDLEKLKEFIKINKLKLYHDIFKDKTKNGYAGYIDNGVKQDEFYKYLKTILTKIDDSDYFLDKIERDDFLRKQRTFDNGSIPHQIHLQEMHSILRRQGDYYPFLKENQAKIEKILTFRIPYYVGPLARKDSRFAWANYHSDEPITPWNFDEVVDKEKSAEKFITRMTLNDLYLPEEKVLPKHSHVYETFTVYNELTKIKYVNEQGESFFFDANMKQEIFDHVFKENRKVTKAKLLSYLNNEFEEFRINDLIGLDKDSKSFNASLGTYHDLKKILDKSFLDDKTNGQIIEDIVLTLTLFEDRDMIHERLQKYSDFFTSQQLKKLERRHYTGWGRLSYKLINGIRNKENNKTILDFLIDDGHANRNFMQLINDESLSFKTIIQEAQVVGDVDDIEAVVHDLPGSPAIKKGILQSVKIVDELVKVMGDNPDNIVIEMARENQTTGYGRNKSNQRLKRLQDSLKEFGSDILSKKKPSYVDSKVENSHLQNDRLFLYYIQNGKDMYTGEELDIDRLSDYDIDHIIPQAFIKDNSIDNKVLTSSAKNRGKSDDVPSIEIVRNRRSYWYKLYKSGLISKRKFDNLTKAERGGLTEADKAGFIKRQLVETRQITKHVAQILDARFNTKRDENDKVIRDVKVITLKSNLVSQFRKEFKFYKVREINDYHHAHDAYLNAVVGTALLKKYPKLTPEFVYGEYKKYDVRKLIAKSSDDYSEMGKATAKYFFYSNLMNFFKTEVKYADGRVFERPDIETNADGEVVWNKQKDFDIVRKVLSYPQVNIVKKVEAQTGGFSKESILSKGDSDKLIPRKTKKVYWNTKKYGGFDSPTVAYSVLVVADIEKGKAKKLKTVKELVGISIMERSFFEENPVSFLEKKGYHNVQEDKLIKLPKYSLFEFEGGRRRLLASATELQKGNEVMLPAHLVELLYHAHRIDSFNSTEHLKYVSEHKKEFEKVLSCVENFSNLYVDVEKNLSKVRAAAESMTNFSLEEISASFINLLTLTALGAPADFNFLGEKIPRKRYTSTKECLSATLIHQSVTGLYETRIDLSKLGEE

SEQ ID NO: 663 - protein, 1368 aa, Streptococcus iniae
MRKPYSIGLDIGTNSVGWAVITDDYKVPSKKMRIQGTTDRTSIKKNLIGALLFDNGETAEATRLKRTTRRRYTRRKYRIKELQKIFSSEMNELDIAFFPRLSESFLVSDDKEFENHPIFGNLKDEITYHNDYPTIYHLRQTLADSDQKADLRLIYLALAHIIKFRGHFLIEGNLDSENTDVHVLFLNLVNIYNNLFEEDIVETASIDAEKILTSKTSKSRRLENLIAEIPNQKRNMLFGNLVSLALGLTPNFKTNFELLEDAKLQISKDSYEEDLDNLLAQIGDQYADLFIAAKKLSDAILLSDIITVKGASTKAPLSASMVQRYEEHQQDLALLKNLVKKQIPEKYKEIFDNKEKNGYAGYIDGKTSQEEFYKYIKPILLKLDGTEKLISKLEREDFLRKQRTFDNGSIPHQIHLNELKAIIRRQEKFYPFLKENQKKIEKLFTFKIPYYVGPLANGQSSFAWLKRQSNESITPWNFEEVVDQEASARAFIERMTNFDTYLPEEKVLPKHSPLYEMFMVYNELTKVKYQTEGMKRPVFLSSEDKEEIVNLLFKKERKVTVKQLKEEYFSKMKCFHTVTILGVEDRFNASLGTYHDLLKIFKDKAFLDDEANQDILEEIVWTLTLFEDQAMIERRLVKYADVFEKSVLKKLKKRHYTGWGRLSQKLINGIKDKQTGKTILGFLKDDGVANRNFMQLINDSSLDFAKIIKNEQEKTIKNESLEETIANLAGSPAIKKGILQSIKIVDEIVKIMGQNPDNIVIEMARENQSTMQGIKNSRQRLRKLEEVHKNTGSKILKEYNVSNTQLQSDRLYLYLLQDGKDMYTGKELDYDNLSQYDIDHIIPQSFIKDNSIDNTVLTTQASNRGKSDNVPNIETVNKMKSFWYKQLKSGAISQRKFDHLTKAERGALSDFDKAGFIKRQLVETRQITKHVAQILDSRFNSNLTEDSKSNRNVKIITLKSKMVSDFRKDFGFYKLREVNDYHHAQDAYLNAVVGTALLKKYPKLEAEFVYGDYKHYDLAKLMIQPDSSLGKATTRMFFYSNLMNFFKKEIKLADDTIFTRPQIEVNTETGEIVWDKVKDMQTIRKVMSYPQVNIVMKTEVQTGGFSKESIWPKGDSDKLIARKKSWDPKKYGGFDSPIIAYSVLVVAKIAKGKTQKLKTIKELVGIKIMEQDEFEKDPIAFLEKKGYQDIQTSSIIKLPKYSLFELENGRKRLLASAKELQKGNELALPNKYVKFLYLASHYTKFTGKEEDREKKRSYVESHLYYFDEIMQIIVEYSNRYILADSNLIKIQNLYKEKDNFSIEEQAINMLNLFTFTDLGAPSAFKFFNGDIDRKRYSSTNEIINSTLIYQSPTGLYETRIDLSKLGGK

SEQ ID NO: 664 - protein, 1392 aa, Streptococcus mitis
MNNNNYSIGLDIGTNSVGWAVITDDYKVPSKKMKVLGNTDKHFIKKNLIGALLFDEGATAEDRRFKRTARRRYTRRKNRLRYLQEIFSEEMSKVDSSFFHRLDDSFLVPEDKRGSKYPIFATLAEEKEYHKKFPTIYHLRKHLADSKEKTDLRLIYLALAHMIKYRGHFLYEESFDIKNNDIQKIFSEFISIYDNTFEGSSLSGQNAQVEAIFTDKISKSAKRERILKLFAYEKSTDLFSEFLKLIVGNQADFKKHFDLEEKAPLQFSKDTYDEDLENLLGQIGDDFADLFLVAKKLYDAILLSGILTVTDSSTKAPLSASMIERYENHQKDLAALKQFIQNNLQEKYDEVFSDQSKDGYARYINGKTTQEAFYKYIKNLLSKFEGSDYFLDKIEREDFLRKQRTFDNGSIPHQIHLQEMNAIIRRQGEHYPFLKEYKEKIETILTFRIPYYVGPLARGNRNFAWLTRNSDQAIRPWNFEEIVDQASSAEEFINKMTNYDLYLPEEKVLPKHSLLYETFAVYNELTKVKFISEGLRDYQFLDSGQKKQIVNQLFKEKRKVTEKDIIQYLHNVDGYDGIELKGIEKQFNASLSTYHDLLKIIKDKEFMDDPKNEEILENIVHTLTIFEDREMIKQRLAQYASIFDKKVIKALTRRHYTGWGKLSAKLINGICDKKTGKTILDYLIDDGYSNRNFMQLINDDGLSFKDIIQKAQVVGKTNDVKQVVQELPGSPAIKKGILQSIKLVDELVKVMGHAPESIVIEIARENQTTARGKKNSQQRYKRIEDALKNLAPGLDSNILKEHPTDNIQLQNDRLFLYYLQNGKDMYTGEALDINQLSSYDIDHIVPQAFIKDDSLDNRVLTSSKDNRGKSDNVPSLEVVQKRKAFWQQLLDSKLISEHKFNNLTKAERGGLDERDKVGFIRRQLVETRQITKHVAQILDARFNTEVNEKDKKNRTVKIITLKSNLVSNFRKEFKLYKVREINDYHHAHDAYLNAVVAKAILKKYPKLEPGFVYGDYQKYDIKRYISRSKDPKEVEKATEKYFFYSNLLNFFKEEVHYADGTIVKRENIEYSKDTGEIAWNKEKDFATIKKVLSLPQVNIVKKTEIQTHGLDRGKPRGLFNSNPSPKPSEDRKENLVPIKQGLDPRKYGGYAGISNSYAVLVKAIIEKGAKKQQKTVLEFQGISILDKINFEKNKENYLLEKGYIKILSTITLPKYSLFEFPDGTRRRLASILSTNNKRGEIHKGNELVIPEKYTTLLYHAKNINKTLEPEHLEYVEKHRNDFAKLLEYVLNFNDKYVGALKNGERIRQAFIDWETVDIEKLCFSFIGPRNSKNAGLFELTSQGSASDFEFLGVKIPRYRDYTPSSLLNATLIHQSITGLYETRIDLSKLGED

SEQ ID NO: 665 - protein, 1134 aa, Streptococcus mutans
MANGKILGLDIGIASVGVGIIDKETGKIIHVNSRIFPAATADSNVERRGFRQGRRLVRRKKHRKVRLADLFLDSNLLTDFSKVSLNLNPYQLRVKGLNEELSNEELFIALKSIVSRRGISYLDDASEDSGANSSEYGKAVEENRKLLEDRTPGQIQLERFEKYGKVRGDFTVVENGENHRLINVFSTSAYKKEAERILRRQQEFNMRIADEFIEAYLTILTGKRKYYHGPGNEKSRTDYGRFRTDGTTLDNIFGILIGKCTFYPDEYRAAKASYTAQEFNLLNDLNNLTVPTETKKLSEEQKRQIIEHAKTVKTLGAPTLLKYIVKLVGCSADDIKGYRIDKSDKPEIHTFEAYRKMRTMELIKVDDLSRESLDALAHILTLNTEREGIEEAIRDRFTNKEFNQEQINELVLFRKNNSSLFGKGWHNFSLKLMKELIPELYETSEEQMTILTRLGKQRVKKSSNRTNYIDEKELTEEIYNPVVAKSVRQAIKIINLATKKYGVFDNIVIEMARESNEDDEKKAIQNAQKANEDEKKAALLKAAHQFNGKEELPDSIFHGHKELLTKIRLWHQQGEKCLYTGKTIFINDLIHNPYKYEIDHILPLSLSFDDSLANKVLVLSTANQEKGQRTPFQSLDSMDGAWTYREFKSYVKGLKTLSNKKKDYLLTEENIDKIEVKQKFIERNLVDTRYSSRVVLNALQDFYKERKFDTKISVVRGQFTSQLRRKWRIEKTRETYHHHAVDALIIAASSQLNLWKKQNNPLISYKEDQFVDPETGEILSLSDDEYKKLVFKAPYEHFVDTLKSKKFEDSILFSYQVDSKYNRKISGATICGTRKAQLGKDTQEETYVLGKIKDIYSQKGYEDFIKKYKKDKTQFLMYHKDPQTFEKVIEEILKTYPDKELNEKGKEVSCNPFEKYRQENGPVRKYSKKGNGPEIKSLKYYDEVLGKNIDITPKNSLNKVVLRSLNPWRTDVYFNHETRKYEFLGLKYSDLRYLKGEHRYGILIGDYKKIKDKEGIEKESEFKFTLYKNDLILIKDTAKGKEELFRFWSRTGKDNAKTFEKNKIELKPYSKSQFEKGEDTNVLGKLYASSNQLQKSFGTLENLSIYKVRTDVLGNKYFIKKEGDKPQLNFKKKL

SEQ ID NO: 666 - protein, 1134 aa, Streptococcus mutans; identical to SEQ ID NO: 665

SEQ ID NO: 667 - protein, 1128 aa, Streptococcus mutans
MANSKILGLDIGIASVGVGIIDKETGKIIHVNSRIFPAATADSNVERRGFRQGRRLVRRKKHRKVRLADLFLDSNLLTDFSKVSLNLNPYQLRVKGLNEELSNEELFIALKSIVSRRGISYLDDASEDSGANSSEYGKAVEENRKLLEDRTPGQIQLERFEKYGKVRGDFTVVENGENHRLINVFSTSAYKKEAERILRRQQEFNIRIADEFIEAYLTILTGKRKYYHGPGNEKSRTDYGRFRTDGTTLDNIFGILIGKCTFYPDEYRAAKASYTAQEFNLLNDLNNLTVPTETKKLSEEQKRQIIEHAKTVKTLGAPTLLKYIAKLVGCSADDIKGYRIDKSDKPEIHTFEAYRKMRTMELIKVADLSRESLDALAHILTLNTEREGIEEAIRDRFTNKEFNQEQINELVLFRKNNSSLFGKGWHNFSLKLMKELIPELYETSEEQMTILTRLGKQRVKKSSNRTNYIDEKELTEEIYNPVVAKSVRQAIKIINLATKKYGVFDNIVIEMARESNEDDEKKAIQNAQKANEDEKEAALLKAAHQFNGKEELPDSIFHGHKELLTKIRLWHQQGEKCLYTGKTIFINDLIHNPYKYEIDHILPLSLSFDDSLANKVLVLSTANQEKGQRTPFQSLDSMDGAWTYREFKAYVKGLKTLSNKKKDYLLNEEDINKNEVKQKFIERNLVDTRYSSRVVLNTLQDFYKKREFDTKISVVRGQFTSQIRRKWRIEKTRETYHHHAVDALIIAASSQLNLWKKQNNPLISYKEDQFVDPETGEILSLSDDEYKELVFKAPYDHFVDTLKSKKFEDSILFSYQVDSKYNRKISDATIYGTRKARLGKDSQEETYVLGKIKDIYSQKGYEDFIKKYKKDKTQFLMYHKDPQTFEKVIEEILKTYSDKELNEKGKEVPCNPFEKYRQENGPVRKYSKKGNGPEIKSIKYYDNKLGNHIDITPNNSHHQVVLQSLKPWRTDVYFNPKSGKYELMGLKYSDLRFEKVSGDYGISVKKYNEIKSKEGVDENSEFKFTLYKNDLILIKDTESGEQELFRFLSRTMPNQKHYVELKPYDKSKFEGHQKLMDIFGEVAKGGQCLKGLNKSNISIYKVKTDVLGNKYFIKKEGDQPQLNFKKKI

SEQ ID NO: 668 - protein, 1128 aa, Streptococcus mutans; identical to SEQ ID NO: 667

SEQ ID NO: 669 - protein, 1338 aa, Streptococcus mutans
MDLIGTNSVGWAVVTDDYKVPAKKMKVLGNTDKSHIKKNLLGALLFDSGNTAADRRLKRTARRRYTRRRNRILYLQEIFAEEMSKVDDSFFHRLEDSFLVTEDKRGERHPIFGNLEEEVKYHENFPTIYHLRQYLADNPEKVDLRLVYLALAHIIKFRGHFLIEGKFDTRNNDVQRLFQEFLAVYDNTFENSSLQEQNVQVEEILTDKISKSAKKDRVLKLFPNEKSNGRFAEFLKLIVGNQADFKKHFELEEKAPLQFSKDTYEEELEVLLAQIGDNYAELFLSAKKLYDSILLSGILTVTDVSTKAPLSASMIQRYNEHQMDLAQLKQFIRQKLSDKYNEVFSDVSKDGYAGYIDGKTNQEAFYKYLKGLLNKIEGSGYFLDKIEREDFLRKQRTFDNGSIPHQIHLQEMRAIIRRQAEFYPFLADNQDRIEKILTFRIPYYVGPLARGKSDFAWLSRKSADKITPWNFDEIVDKESSAEAFINRMTNYDLYLPNQKVLPKHSLLYEKFTVYNELTKVKYKTEQGKTAFFDANMKQEIFDGVFKVYRKVTKDKLMDFLEKEFDEFRIVDLTGLDKENKAFNASYGTYHDLRKILDKDFLDNSKNEKILEDIVLTLTLFEDREMIRKRLENYSDLLTKEQVKKLERRHYTGWGRLSAELIHGIRNKESRKTILDYLIDDGNSNRNFMQLINDDALSFKEEIAKAQVIGETDNLNQVVSDIAGSPAIKKGILQSLKIVDELVKIMGHQPENIVVEMARENQFTNQGRRNSQQRLKGLTDSIKEFGSQILKEHPVEHSQLQNDRLFLYYLQNGRDMYTGEELDIDYLSQYDIDHIIPQAFIKDNSIDNRVLTSSKENRGKSDDVPSKNVVRKMKSYWSKLLSAKLITQRKFDNLTKAERGGLTDDDKAGFIKRQLVETRQITKHVARILDERFHTETDENNKKIRQVKIVTLKSNLVSNFRKEFELYKVREINDYHHAHDAYLNAVIGKALLGVYPQLEPEFVYGDYPHFHGHKENKATAKKFFYSNIMNFFKKDDVRTDKNGEIIWKKDEHISNIKKVLSYPQVNIVKKVEEQTGGFSKESILPKGNSDKLIPRKTKKFYWDTKKYGGFDSPIVAYSILVIADIEKGKSKKLKTVKALVGVTIMEKMTFERDPVAFLERKGYRNVQEENIIKLPKYSLFKLENGRKRLLASARELQKGNEIVLPNHLGTLLYHAKNIHKVDEPKHLDYVDKHKDEFKELLDVVSNFSKKYTLAEGNLEKIKELYAQNNGEDLKELASSFINLLTFTAIGAPATFKFFDKNIDRKRYTSTTEILNATLIHQSITGLYETRIDLSKLGGD

SEQ ID NO: 670 - protein, 1338 aa, Streptococcus mutans; identical to SEQ ID NO: 669

SEQ ID NO: 671 - protein, 1345 aa, Streptococcus mutans
MKKPYSIGLDIGTNSVGWAVVTDDYKVPAKKMKVLGNTDKSHIEKNLLGALLFDSGNTAEDRRLKRTARRRYTRRRNRILYLQEIFSEEMGKVDDSFFHRLEDFFLVTEDKRGERHPIFGNLEEEVKYHENFPTIYHLRQYLADNPEKVDLRLVYLALAHIIKFRGHFLIEGKFDTRNNDVQRLFQEFLAVYDNTFENSSLQEQNVQVEEILTDKISKSAKKDRVLKLFPNEKSNGRFAEFLKLIVGNQADFKKHFELEEKAPLQFSKDTYEEELEVLLAQIGDNYAELFLSAKKLYDSILLSGILTADDSSTKAPLSASMIQRYNEHQMDLAQLKQFIRQKLSDKYNEVFSDVSKDGYAGYIDGKTNQEAFYKYLKGLLNKIEGSGYFLDKIEREDFLRKQRTFDNGSIPHQIHLQEMRAIIRRQSEFYPFLADNQDRIEKILTFRIPYYVGPLARGKSDFAWLSRKSADKITPWNFDEIVDKESSAEAFINRMTNYDLYLPNQKVLPKHSLLYEKFTVYNELTKVKYKTEQGETAFFDANMKQEIFDGVFKVYRKVTKDKLMDFLEKEFDEFRIVDLTGLDKENKAFNASYGTYHDLRKILDKDFLDNSKNEKILEDIVLTLTLFEDREMIRKRLKNYSDLLTKEQLKKLERRHYTGWGRLSAELIHGIRNKESRKTILDYLIDDGNSNRNFMQLINDDALSFKEEIAKAQVIGETDNLNQVVSDIAGSPAIKKGILQSLKIVDELVKIMGHQPENIVVEMARENQFTNQGRRNSQQRLKGLTDSIKEFGSQILKEHPVENSQLQNDRLFLYYLQNGRDMYTGEELDIDYLSQYDIDHIIPQAFIKDNSIDNRVLTSSKENRGKSDDVPSKDVVRKMKPYWSKLLSAKLITQRKFDNLTKAERGGLTDDDKAGFIKRQLVETRQITKHVARILDERFNTETDENNKKIRQVKIVTLKSNLVSNFRKEFELYKVREINDYHHAHDAYLNAVIGKALLGVYPQLEPEFVYGDYPHFHGHEENKATAKKFFYSNIMNFFKKDDVRTDKNGEIIWKKDEHISNIKKVLSYPQVNIVKKVEEQTGGFSKESILPKGNSDKLIPRKTKKFYWDTKKYGGFDSPIVAYSILVIADIEKGKSKKLKTVKALVGVTIMEKMTFERDPVAFLERKGYRNVQEENIIKLPKYSLFKLENGRKRLLASARELQKGNEIVLPNHLGTLLYHAKNIHKVDEPKHLDYVDKHKDEFKELLDVVSNFSKKYTLAEGNLEKIKELYAQNNGEDLKELASSFINLLTFTAIGAPATFKFFDKNIDRKRYTSTTEILNATLIHQSITGLYETRIDLSKLGGD

SEQ ID NO: 672 - protein, 1345 aa, Streptococcus mutans; identical to SEQ ID NO: 671

SEQ ID NO: 673 - protein, 1229 aa, Streptococcus mutans
MKKPYSIGLDIGTNSVGWAVVTDDYKVPAKKMKVLGNTDKSHIEKNLLGALLFDSGNTAEDRRLKRTARRRYTRRRNRILYLQEIFSEEMGKVDDSFFHRLEDSFLVTEDKRGERHPIFGNLEEEVKYHENFPTIYHLRQYLADNPEKVDLRLVYLALAHIIKFRGHFLIEGKFDTRNNDVQRLFQEFLAVYDNTFENSSLQEQNIQVEEILTDKISKSAKKDRVLKLFPNEKSNGRFAEFLKLIVGNQADFKKHFELEEKAPLQFSKDTYEEELEVLLAQIGDNYAELFLSAKKLYDSILLSGILTVTDVGTKAPLSASMIQRYNEHQMDLTQLKQFIRQKLSDKYNEVFSDVSKDGYAGYIDGKTNQEAFYKYLKGLLNKIEGSGYFLDKIEREDFLRKQRTFDNGSIPHQIHLQEMRAIIRRQAEFYPFLADNQDRIEKILTFRIPYYVGPLARGKSDFAWLSRKSADKITPWNFDEIVDKESSAEAFINRMTNYDLYLPNQKVLPKHSLLYEKFTVYNELTKVKYKTEQGKTAFFDANMKQEIFDGVFKVYRKVTKDKLMDFLEKEFDEFRIVDLTGLDKENKVFNASYGTYHDLCKILDKDFLDNSKNEKILEDIVLTLTLFEDREMIRKRLENYSDLLTKEQVKKLERRHYTGWGRLSAELIHGIRNKESRKTILDYLIDDGNSNRNFMQLINDDALSFKEEIAKAQVIGETDNLNQVVSDIAGSPAIKKGILQSLKIVDELVKIMGHQPENIVVEMARENQFTNQGRRNSQQRLKGLTDSIKEFGSQILKEHPVENSQLQNDRLFLYYLQNGRDMYTGEELDIDYLSQYDIDHIIPQAFIKDNSIDNRVLTSSKENRGKSDDVPSKDVVRKMKPYWSKLLSAKLITQRKFDNLTKAERGGLTDDDKAGFIKRQLVETRQITKHVARILDERFNTETDENNKKIRQVKIVTLKSNLVSNFRKEFELYKVREINDYHHAHDAYLNAVIGKALLGVYPQLEPEFVYGDYPHFHGHEENKATAKKFFYSNIMNFFKKDDVRTDKNGEIIWKKDEHISNIKKVLSYPQVNIVKKVEEQTIGQNGGLFDDNPKSPLEVIPSKLVPLKKALNPEKYGGYQKPTTAYPILLIVDTKQLIPISVMDKKRFEQNPVKFLKDKGYQQIEKNNFVKLPKYTLVDIGNGIKRLWASSKEVHKGNQLVVSKKSQDLLYHAHHLDNDYSNEYVKNHY

SEQ ID NO: 674 - protein, 1229 aa, Streptococcus mutans; identical to SEQ ID NO: 673

SEQ ID NO: 675 - protein, 1345 aa, Streptococcus mutans
MKKPYSIGLDIGTNSVGWAVVTDDYKVPAKKMKVLGNTDKSHIEKNLLGALLFDSGNTAEDRRLKRTARRRYTRRRNRILYLQEIFSEEMGKVDDSFFHRLEDSFLVTEDKRGERHPIFGNLEEEVKYHENFPTIYHLRQYLADNPEKVDLRLVYLALAHIIKFRGHFLIEGKFDTRNNDVQRLFQEFLAVYDNTFENSSLQEQNVQVEEILTDKISKSAKKDRVLKLFPNEKSNGRFAEFLKLIVGNQADFKKHFELEEKAPLQFSKDTYEEELEVLLAQIGDNYAELFLSAKKLYDSILLSGILTVTDVGTKAPLSASMIQRYNEHQMDLAQLKQFIRQKLSDKYNEVFSDVSKDGYAGYIDGKTNQEAFYKYLKGLLNKIEGSGYFLDKIEREDFLRKQRTFDNGSIPHQIHLQEMRAIIRRQAEFYPFLADNQDRIEKLLTFRIPYYVGPLARGKSDFAWLSRKSADKITPWNFDEIVDKESSAEAFINRMTNYDLYLPNQKVLPKHSLLYEKFTVYNELIKVKYKTEQGKTAFFDANMKQEIFDGVFKVYRKVTKDKLMDFLEKEFDEFRIVDLTGLDKENKVFNASYGTYHDLCKILDKDFLDNSKNEKILEDIVLTLTLFEDREMIRKRLENYSDLLTKEQVKKLERRHYTGWGRLSAELIHGIRNKESRKTILDYLIDDGNSNRNFMQLINDDALSFKEEIAKAQVIGETDNLNQVVSDIAGSPAIKKGILQSLKIVDELVKIMGHQPENIVVEMARENQFTNQGRRNSQQRLKGLTDSIKEFGSQILKEHPVENSQLQNDRLFLYYLQNGRDMYTGEELDIDYLSQYDIDHIIPQAFIKDNSIDNRVLTSSKENRGKSDDVPSKDVVRKMKSYWSKLLSAKLITQRKFDNLTKAERGGLTDDDKAGFIKRQLVETRQITKHVARILDERFNTETDENNKKIRQVKIVTLKSNLVSNFRKEFELYKVREINDYHHAHDAYLNAVIGKALLGVYPQLEPEFVYGDYPHFHGHKENKATAKKFFYSNIMNFFKKDDVRTDKNGEIIWKKDEHISNIKKVLSYPQVNIVKKVEEQTGGFSKESILPKGNSDKLIPRKTKKFYWDTKKYGGFDSPIVAYSILVIADIEKGKSKKLKTVKALVGVTIMEKMTFERDPVAFLERKGYRNVQEENIIKLPKYSLFKLENGRKRLLASARELQKGNEIVLPNHLGTLLYHAKNIHKVDEPKHLDYVDKHKDEFKELLDVVSNFSKKYTLAEGNLEKIKELYAQNNGEDLKELASSFINLLTFTAIGAPATFKFFDKNIDRKRYTSTTEILNATLIHQSITGLYETRIDLNKLGGD

SEQ ID NO: 676 - protein, 1350 aa, Streptococcus mutans
MKKPYSIGLDIGTNSVGWAVVTDDYKVPAKKMKVLGNTDKSHIEKNLLGALLFDSGNTAEDRRLKRTARRRYTRRRNRILYLQEIFSEEMGKVDDSFFHRLEDSFLVTEDKRGERHPIFGNLEEEVKYHENFPTIYHLRQYLADNPEKVDLRLVYLALAHIIKFRGHFLIEGKFDTRNNDVQRLFQEFLAVYDNTFENSSLQEQNVQVEEILTDKISKSAKKDRVLKLFPNEKSNGRFAEFLKLIVGNQADFKKHFELEEKAPLQFSKDTYEEELEVLLAQIGDNYAELFLSAKKLYDSILLSGILTVTDVSTKAPLSASMIQRYNEHQMDLTQLKQFIRQKLSDKYNEVFSDVSKDGYAGYIDGKTNQEAFYKYLKGLLNKIEGSGYFLDKIEREDFLRKQRTFDNGSIPHQIHLQEMRAIIRRQAEFYSFLADNQDRIEKILTFRIPYYVGPLARGKSDFAWLSRKSADKITPWNFDEIVDKESSAEAFINRMTNYDLYLPNQKVLPKHSLLYEKFTVYNELTKVKYKTEQGKTAFFDANMKQEIFDGVFKVYRKVTKDKLMDFLEKEFDEFRIVDLTGLDKENKAFNASYGTYHDLRKILDKDFLDNSKNEKILEDIVLTLTLFEDREMIRKRLENYSDLLTKEQVKKLERRHYTGWGRLSAELIHGIRNKESRKTILDYLIDDGNSNRNFMQLINDDALSFKEEIAKAQVIGETDNLNQVVSDIAGSPAIKKGILQSLKIVDELVKIMGHQPENIVVEMARENQFTNQGRRNSQQRLKGLTDSIKEFGSQILKEHPVENSQLQNDRLFLYYLQNGRDMYTGEELDIDYLSQYDIDHIIPQAFIKDNSIDNRVLTSSKENRGKSDDVPSEDVVNRMRPFWNKLLSSGLISQRKYNNLTKKELTLDDKAGFIKRQLVETRQITKHVARMLDERFNKEFDDNNKRIRKVKIVTLKSNLVSSFRKEFELYKVREINDYHHAHDAYLNAVVVKALLVKYSKLEPEFVYGEYPKYNSYRERKTATQKMFFYSNIMNMFKSKVKLADDQIVERPMIEVNDETGEIAWDKTKHITTVKKVLSYPQVNIVKKVEEQTIGQNGGLFDDNPKSPLEVIPSKLVPLKKALNPEKYGGYQKPTTAYPILLIVDTKQLIPISVMDKKRFEQNPVKFLKDKGYQQIEKNNFVKLPKYTLVDIGNGIKRLWASSKEVHKGNQLVVSKKSQDLLYHAHHLDNDYSNEYVKNHYQQFDILFNEITSFSKKCKLGKEHIQKIEEAYSKERDSASIEELADGFIKLLGFTQLGATSPFSFLGIKLNQKQYTGKKDYLLPCMEATLIHQSITGLYETRIDLSKLGGD

SEQ ID NO: 677 - protein, 1350 aa, Streptococcus mutans
MKKPYSIGLDIGTNSVGWAVVTDDYKVPAKKMKVLGNTDKSHIEKNLLGALLFDSGNTAEDRRLKRTARRRYTRRRNRILYLQEIFSEEMGKVDDSFFHRLEDSFLVTEDKRGERHPIFGNLEEEVKYHENFPTIYHLRQYLADNPEKVDLRLVYLALAHIIKFRGHFLIEGKFDTRNNDVQRLFQEFLAVYDNTFENSSLQEQNVQVEEILTDKISKSAKKDRVLKLFPNEKSNGRFAEFLKLIVGNQADFKKHFELEEKAPLQFSKDTYEEELEVLLAQIGDNYAELFLSAKKLYDSILLSGILTVTDVSTKAPLSASMIQRYNEHQMDLTQLKQFIRQKLSDKYNEVFSDVSKDGYAGYIDGKTNQEAFYKYLKGLLNKIEGSGYFLDKIEREDFLRKQRTFDNGSIPHQIHLQEMRAIIRRQAEFYPFLADNQDRIEKILTFRIPYYVGPLARGKSDFAWLSRKSADKITPWNFDEIVDKESSAEAFINRMTNYDLYLPNQKVLPKHSLLYEKFTVYNELTKVKYKTEQGKTAFFDANMKQEIFDGVFKVYRKVTKDKLMDFLEKEFDEFRIVDLTGLDKENKAFNASYGTYHDLRKILDKDFLDNSKNEKILEDIVLTLTLFEDREMIRKRLKNYSDLLTKEQLKKLERRHYTGWGRLSAELIHGIRNKESRKTILDYLIDDGNSNRNFMQLINDDALSFKEEIAKAQVIGETDNLNQVVSDIAGSPAIKKGILQSLKIVDELVKIMGHQPENIVVEMARENQFTNQGRQNSQQRLKGLTDSIKEFGSQILKEHPVENSQLQNDRLFLYYLQNGRDMYTGEELDIDYLSQYDIDHIIPQAFIKDNSIDNRVLTSSKENRGKSDDVPSEDVVNRMRPFWNKLLSSGLISQRKYNNLTKKELTLDDKAGFIKRQLVETRQITKHVARMLDERFNKEFDDNNKRICKVKIVTLKSNLVSSFRKEFELYKVREINDYHHAHDAYLNAVVVKALLVKYSKLEPEFVYGEYPKYNSYRERKTATQKMFFYSNIMNMFKSKVKLADDQIVERPMIEVNDETGEIAWDKTKHITTVKKVLSYPQVNIVKKVEEQTIGQNGGLFDDNPKSPLEVIPSKLVPLKKALNPEKYGGYQKPTTAYPILLIVDTKQLIPISVMDKKRFEQNPVKFLKDKGYQQIEKNNFVKLPKYTLVDIGNGIKRLWASSKEVHKGNQLVVSKKSQDLLYHAHHLDNDYSNEYVKNHYQQFDILFNEITSFSKKCKLGKEHIQKIEEAYSKERDSASIEELADGFIKLLGFTQLGATSPFSFLGIKLNQKQYTGKKDYLLPCMEATLIHQSITGLYETRIDLSKLGGD

SEQ ID NO: 678 - protein, 1345 aa, Streptococcus mutans; identical to SEQ ID NO: 675

SEQ ID NO: 679 - protein, 1350 aa, Streptococcus mutans; identical to SEQ ID NO: 676

SEQ ID NO: 680 - protein, 1350 aa, Streptococcus mutans; identical to SEQ ID NO: 677

SEQ ID NO: 681 - protein, 1345 aa, Streptococcus mutans
MKKPYSIGLDIGTNSVGWAVVTDDYKVPAKKMKVLGNTDKSHIKKNLLGALLFDSGNTAADRRLKRTARRRYTRRRNRILYLQEIFAEEMSKVDDSFFHRLEDSFLVTEDKRGERHPIFGNLEEEVKYHENFPTIYHLRQYLADNPEKVDLRLVYLALAHIIKFRGHFLIEGKFDTRNNDVQRLFQEFLAVYDNTFENSSLQEQNVQVEEILTDKISKSAKKDRVLKLFPNEKSNGRFAEFLKLIVGNQADFKKHFELEEKAPLQFSKDTYEEELEVLLTQIGDNYAELFLSAKKLYDSILLSGILTVTDVSTKAPLSASMIQRYNEHQMDLAQLKQFIRQKLSDKYNEVFSDVSKDGYAGYIDGKTNQEAFYKYLKGLLNKIEGSGYFLDKIEREDFLRKQRTFDNGSIPHQIHLQEMRAIIRRQAEFYPFLADNQDRIEKILTFRIPYYVGPLARGKSDFAWLSRKSADKITPWNFDEIVDKESSAEAFINRMTNYDLYLPNQKVLPKHSLLYEKFTVYNELTKVKYKTEQGKTAFFDANMKQEIFDGVFKVYRKVTKDKLMDFLEKEFDEFRIVDLTGLDKENKAFNASYGTYHDLRKILDKDFLDNSKNEKILEDIVLTLTLFEDREMIRKRLENYSDLLTKEQVKKLERRHYTGWGRLSAELIHGIRNKESRKTLLDYLIDDGNSNRNFMQLINDDALSFKEEIAKAQVIGETDNLNQVVSDIAGSPAIKKGILQSLKIVDELVKIMGHQPENIVVEMARENQFTNQGRRNSQQRLKGLTDSIKEFGSQILKEHPVENSQLQNDRLFLYYLQNGRDMYTGEELDIDYLSQYDIDHIIPQAFIKDNSIDNRVLTSSKENRGKSDDVPSKDVVRKMKPYWSKLLSAKLITQRKFDNLTKAERGGLTDDDKAGFIKRQLVETRQITKHVARILDERFNTETDENNKKIRQVKIVTLKSNLVSNFRKEFELYKVREINDYHHAHDAYLNAVIGKALLGVYPQLEPEFVYGDYPHFHGHEENKATAKKFFYSNIMNFFKKDDVRTDKNGEIIWKKDEHISNIKKVLSYPQVNIVKKVEEQTGGFSKESILPKGNSDKLIPRKTKKFYWDTKKYGGFDSPIVAYSILVIADIEKGKSKKLKTVKALVGVTIMEKMTFERDPVAFLERKGYRNVQEENIIKLPKYSLFKLENGRKRLLASARELQKGNEIVLPNHLGTLLYHAKNIHKVDEPKHLDYVDKHKDEFKELLDVVSNFSKKYTLAEGNLEKIKELYAQNNGEDLKELSSSFINLLTFTAIGAPAAFKFFDKNIDRKRYTSTTEILNATLIHQSITGLYETRIDLSKLGGD

SEQ ID NO: 682 - protein, 1345 aa, Streptococcus mutans
MKKPYSIGLDIGTNSVGWAVVTDDYKVPAKKMKVLGNTDKSHIKKNLLGALLFDSGNTAADRRLKRTARRRYTRRRNRILYLQEIFAEEMSKVDDSFFHRLEDSFLVTEDKRGERHPIFGNLEEEVKYHENFPTIYHLRQYLADNPEKVDLRLVYLALAHIIKFRGHFLIEGKFDTRNNDVQRLFQEFLAVYDNTFENSSLQEQNVQVEEILTDKISKSAKKDRVLKLFPNEKSNGRFAEFLKLIVGNQADFKKHFELEEKAPLQFSKDTYEEELEVLLAQIGDNYAELFLSAKKLYDSILLSGILTVTDVSTKAPLSASMIQRYNEHQMDLAQLKQFIRQKLSDKYNEVFSDVSKDGYAGYIDGKTNQEAFYKYLKGLLNKIEGSGYFLDKIEREDFLRKQRTFDNGSIPHQIHLQEMRAIIRRQAEFYPFLADNQDRIEKILTFRIPYYVGPLARGKSDFAWLSRKSADKITPWNFDEIVDKESSAEAFINRMTNYDLYLPNQKVLPKHSLLYEKFTVYNELTKVKYKTEQGKTAFFDANMKQEIFDGVFKVYRKVTKDKLMDFLEKEFDEFRIVDLTGLDKENKAFNASYGTYHDLRKILDKDFLDNSKNEKILEDIVLTLTLFEDREMIRKRLENYSDLLTKEQVKKLERRHYTGWGRLSAELIHGIRNKESRKTILDYLIDDGNSNRNFMQLINDDALSFKEEIAKAQVIGETDNLNQVVSDIAGSPAIKKGILQSLKIVDELVKIMGHQPENIVVEMARENQFTNQGRRNSQQRLKGLTDSIKEFGSQILKEHPVEHSQLQNDRLFLYYLQNGRDMYTGEELDIDYLSQYDIDHIIPQAFIKDNSIDNRVLTSSKENRGKSDDVPSKNVVRKMKSYWSKLLSAKLITQRKFDNLTKAERGGLTDDDKAGFIKRQLVETRQITKHVARILDERFHTETDENNKKIRQVKIVTLKSNLVSNFRKEFELYKVREINDYHHAHDAYLNAVIGKALLGVYPQLEPEFVYGDYPHFHGHKENKATAKKFFYSNIMNFFKKDDVRTDKNGEIIWKKDEHISNIKKVLSYPQVNIVKKVEEQTGGFSKESILPKGNSDKLIPRKTKKFYWDTKKYGGFDSPIVAYSILVIADIEKGKSKKLKTVKALVGVTIMEKMTFERDPVAFLERKGYRNVQEENIIKLPKYSLFKLENGRKRLLASARELQKGNEIVLPNHLGTLLYHAKNIHKVDEPKHLDYVDKHKDEFKELLDVVSNFSKKYTLAEGNLEKIKELYAQNNGEDLKELASSFINLLTFTAIGAPATFKFFDKNIDRKRYTSTTEILNATLIHQSITGLYETRIDLSKLGGD

SEQ ID NO: 683 - protein, 1345 aa, Streptococcus mutans
MKKPYSIGLDIGTNSVGWAVVTDDYKVPAKKMKVLGNTDKSHIKKNLLGALLFDSGNTAADRRLKRTARRRYTRRRNRILYLQEIFAEEMSKVDDSFFHRLEDSFLVTEDKRGERHPIFGNLEEEVKYHENFPTIYHLRQYLADNPEKVDLRLVYLALAHIIKFRGHFLIEGKFDTRNNDVQRLFQEFLAVYDNTFENSSLQEQNVQVEEILTDKISKSAKKDRVLKLFPNEKSNGRFAEFLKLIVGNQADFKKHFELEEKAPLQFSKDTYEEELEVLLAQIGDNYAELFLSAKKLYDSILLSGILTVTDVSTKAPLSASMIQRYNEHQMDLAQLKQFIRQKLSDKYNEVFSDVSKDGYAGYIDGKTNQEAFYKYLKGLLNKIEGSGYFLDKIEREDFLRKQRTFDNGSIPHQIHLQEMRAIIRRQAEFYPFLADNQDRIEKILTFRIPYYVGPLARGKSDFAWLSRKSADKITPWNFDEIVDKESSAEAFINRMTNYDLYLPNQKVLPKHSLLYEKFTVYNELTKVKYKTEQGKTAFFDANMKQEIFDGVFKVYRKVTKDKLMDFLEKEFDEFRIVDLTGLDKENKVFNASYGTYHDLCKILDKDFLDNSKNEKILEDIVLTLTLFEDREMIRKRLENYSDLLTKEQVKKLERRHYTGWGRLSAELIHGIRNKESRKTILDYLIDDGNSNRNFMQLINDDALSFKEEIAKAQVIGETDNLNQVVSDIAGSPAIKKGILQSLKIVDELVKIMGHQPENIVVEMARENQFTKQGRRNSQQRLKGLTDSIKEFGSQILKEHPVENSQLQNDRLFLYYLQNGRDMYTGEELDIDYLSQYDIDHIIPQAFIKDNSIDNRVLTSSKENRGKSDDVPSKDVVRKMKSYWSKLLSAKLITQRKFDNLTKAERGGLTDDDKAGFIKRQLVETRQITKHVARILDERFYTETDENNKKIRQVKIVTLKSNLVSNFRKEFELYKVREINDYHHAHDAYLNAVIGKALLGVYPQLEPEFVYGDYPHFHGHKENKATAKKFFYSNIMNFFKKDDVRTDKNGEIIWKKDEHISNIKKVLSYPQVNIVKKVEEQTGGFSKESILPKGNSDKLIPRKTKKFYWDTKKYGGFDSPIVAYSILVIADIEKGKSKKLKTVKALVGVTIMEKMTFERDPVAFLERKGYRNVQEENIIKLPKYSLFKLENGRKRLLASARELQKGNEIVLPNHLGTLLYHAKNIHKVDEPKHLDYVDKHKDEFKELLDVVSNFSKKYTLAEGNLEKIKELYAQNNGEDLKELASSFINLLTFTAIGAPATFKFFDKNIDRKRYTSTTEILNATLIHQSITGLYETRIDLSKLGGD

SEQ ID NO: 684 - protein, 1345 aa, Streptococcus mutans
MKKPYSIGLDIGTNSVGWAVVTDDYKVPAKKMKVLGNTDKSHIKKNLLGALLFDSGNTAADRRLKRTARRRYTRRRNRILYLQEIFAEEMSKVDDSFFHRLEDSFLVTEDKRGERHPIFGNLEEEVKYHENFPTIYHLRQYLADNPEKVDLRLVYLALAHIIKFRGHFLIEGKFDTRNNDVQRLFQEFLAVYDNTFENSSLQEQNVQVEEILTDKISKSAKKDRVLKLFPNEKSNGRFAEFLKLIVGNQADFKKHFELEEKAPLQFSKDTYEEELEVLLAQIGDNYAELFLSAKKLYDSILLSGILTVTDVSTKAPLSASMIQRYNEHQMDLAQLKQFIRQKLSDKYNEVFSDVSKDGYAGYIDGKTNQEAFYKYLKGLLNKIEGSGYFLDKIEREDFLRKQRTFDNGSIPHQIHLQEMRAIIRRQAEFYPFLADNQDRIEKILTFRIPYYVGPLARGKSDFAWLSRKSADKITPWNFDEIVDKESSAEAFINRMTNYDLYLPNQKVLPKHSLLYEKFTVYNELTKVKYKTEQGKTAFFDANMKQEIFDGVFKVYRKVTKDKLMDFLEKEFDEFRIVDLTGLDKENKAFNASYGTYHDLRKILDKDFLDNSKNEKILEDIVLTLTLFEDREMIRKRLENYSDLLTKEQVKKLERRHYTGWGRLSAELIHGIRNKESRKTILDYLIDDGNSNRNFMQLINDDALSFKEEIAKAQVIGETDNLNQVVSDIAGSPAIKKGILQSLKIVDELVKIMGHQPENIVVEMARENQFTNQGRRNSQQRLKGLTDSIKEFGSQILKEHPVENSQLQNDRLFLYYLQNGRDMYTGEELDIDYLSQYDIDHIIPQAFIKDNSIDNRVLTSSKENRGKSDDVPSKNVVRKMKSYWSKLLSAKLITQRKFDNLTKAERGGLTDDDKAGFIKRQLVETRQITKHVARILDERFHTETDENNKKIRQVKIVTLKSNLVSNFRKEFELYKVREINDYHHAHDAYLNAVIGKALLGVYPQLEPEFVYGDYPHFHGHKENKATAKKFFYSNIMNFFKKDDVRTDKNGEIIWKKDEHISNIKKVLSYPQVNIVKKVEEQTGGFSKESILPKGNSDKLIPRKTKKFYWDTKKYGGFDSPIVAYSILVIADIEKGKSKKLKTVKALVGVTIMEKMTFERDPVAFLERKGYRNVQEENIIKLPKYSLFKLENGRKRLLASARELQKGNEIVLPNHLGTLLYHAKNIHKVDEPKHLDYVDKHKDEFKELLDVVSNFSKKYTLAEGNLEKIKELYAQNNGEDLKELSSSFINLLTFTAIGAPAAFKFFDKNIDRKRYTSTTEILNATLIHQSITGLYETRIDLSKLGGD

SEQ ID NO: 685 - protein, 1345 aa, Streptococcus mutans; identical to SEQ ID NO: 681

SEQ ID NO: 686 - protein, 1345 aa, Streptococcus mutans; identical to SEQ ID NO: 682

SEQ ID NO: 687 - protein, 1345 aa, Streptococcus mutans; identical to SEQ ID NO: 683

SEQ ID NO: 688 - protein, 1345 aa, Streptococcus mutans; identical to SEQ ID NO: 684

SEQ ID NO: 689 - protein, 1345 aa, Streptococcus mutans; identical to SEQ ID NO: 682

SEQ ID NO: 690 - protein, 1345 aa, Streptococcus mutans; identical to SEQ ID NO: 682

SEQ ID NO: 691 - protein, 1345 aa, Streptococcus mutans; identical to SEQ ID NO: 682

SEQ ID NO: 692 - protein, 1345 aa, Streptococcus mutans; identical to SEQ ID NO: 682

SEQ ID NO: 693 - protein, 1359 aa, Streptococcus mutans
MKKPYSIGLDIGTNSVGWAVVTDDYKVPAKKMKVLGNTDKSHIKKNLLGALLFDSGNTAEDRRLKRTARRRYTRRRNRILYLQEIFAEEMMQVDESFFQRLDDSFLVEEDKRGSRYPIFGTLKEEKKYHKEFKTIYHLREKLANSTEKADLRLVYLSLAHMIKFRGHFLIEGQLKAENTNVQALFKDFVEVYDKTVEESHLSEMTVDALSILTEKVSKSRRLENLVECYPTEKKNTLFGNLIALSLGLQPNFKTNFQLSEDAKLQFSKDTYEEDLEGLLGEIGDEYADLFASAKNLYDAILLSGILAVDDNTTKAPLSASMVKRYKEHKEELAAFKRFIKEKLPKKYEEIFKDDTKNGYAGYVGADKKLRKRSGKLATEEEFYKYVKGILNKVEGADVWLDKIDREDFLRKQRTFDNGSIPHQIHLQEMHAILRRQGEHYPFLKENQDKIEKILTFRIPYYVGPLVRKGSRFAWAEYKADEKITPWNFDDILDKEKSAEKFITRMTLNDLYLPEEKVLPKHSLLYETFTVYNELTKVKYVNEQGEAKFFDANMKQEIFDHVFKENRKVTKDKLLNYLNKEFEEFRIVNLTGLDKENKVFNSSLGTYHDLRKILNKSFLDNKENEQIIEDIIQTLTLFEDREMIRQRLQKYSDIFTKAQLKKLERRHYTGWGRLSYKLINGIRDKQSNKTILGYLIDDGYSNRNFMQLINDDALSFKEEIAKAQVIGEMDGLNQVVSDIAGSPAIKKGILQSLKIVDELVKVMGHNPANIVIEMARENQTTAKGRRSSQKRYKRLEEAIKNLDHDLNHKILKEHPTDNQALQNDRLFLYYLQNGRDMYTEDPLDINRLSDYDIDHIIPQAFIKDNSIDNRVLTRSDKNRGKSDDVPSEEVVHKMKPFWSKLLSAKLITQRKFDNLTKAERGGLTDDDKAGFIKRQLVETRQITKHVARILDERFNTETDENNKKIRQVKIVTLKSNLVSNFRKEFELYKVREINDYHHAHDAYLNAVIGKALLGVYPQLEPEFVYGDYPHFHGHKENKATAKKFFYSNIMNFFKKGDVRTDKNGEIIWKKDEHISNIKKVLSYPQVNIVKKVEEQTGGFSKESILPKGNSDKLIPRKTKKFYWDTKKYGGFDSPIVAYSILVIADIEKGKSKKLKTVKALVGVTIMEKMTFERDPVAFLERKGYRNVQEENIIKLPKYSLFKLENGRKRLLASARELQKGNEIVLPNHLETLLYHAKNIHKVDEPKHLDYVDKHKDEFKELLDVVSNFSKKYTLAEGNLEKIKELYAQNNGEDLKELASSFINLLTFTAIGAPAAFKFFDKNIDRKRYTSTTEILNATLIHQSITGLYETRIDLNKLGGD

SEQ ID NO: 694 - protein, 1359 aa, Streptococcus mutans; identical to SEQ ID NO: 693

SEQ ID NO: 695 - protein, 1355 aa, Streptococcus mutans
MKKPYSIGLDIGTNSVGWAVVTDDYKVPAKKMKVLGNTDKSHIKKNLLGALLFDSGNTAEDRRLKRTARRRYTRRRNRILYLQEIFAEEMSKVDDSFFHRLDESFLTDDDKNFDSHPIFGNKAEEDAYHQKFPTIYHLRKHLADSTEKADLRLVYLALAHMIKFRGHFLIEGELNAENTDVQKLFADFVGVYDRTFDDSHLSEITVDASSILTEKISKSRRLEKLINNYPKEKKNTLFGNLIALSLGLQPNFKTNFKLSEDAKLQFSKDTYEEDLEELLGKIGDDYADLFTLAKNLYDAILLSGILTADDSSTKAPLSASMIKRYAEHHEDLEKLKEFIKANKPELYHDIFKDETKNGYAGYIENGVKQDEFYKYLKNTLSKITGSDYFLDQIEREDFLRKQRTFDNGSIPHQIHLQEMHAILRRQGDYYPFLKENQDRIEKILTFRIPYYVGPLARKNSRFAWAEYHSDEAVTPWNFDQVIDKESSAQAFIEHMTNNDLYLPNEKVLPKHSPLYEKYTVYNELTKIKYVTEIGEAKFFDANLKQEIFDGLFKHERKVTKKKLRTFLDKNFDEFRIVDIQGLDKETETFNASYATYQDLLKVIKDKVFMDNPENAEILENIVLTLTLFEDREMIKQRLAKYADVFDKKVIDQLARRHYTGWGRLSAKLLNGIRDKQSCKTIMDYLIDDAQSNRNLMQLITDDNLTFKDDIVKAQYVDNSDDLHQVVQSLAGSPAIKKGILQSLKIVDELVKVMGKEPEQIVVEMARENQTTAKGRRNSQQRYKRLKEAIKSLDRDLNHKILKEHPTDNQALQNNRLFLYYLQNGRDMYTGESLDINRLSDYDIDHVIPQAFIKDNSIDNRVLTSSKANRGKSDDVPSEDVVNRMRPFWNKLLSSGLISQRKYNNLTKKELTLDDKAGFIKRQLVETRQITKHVARMLDERFNKEFDDNNKRIRRVKIVTLKSNLVSSFRKEFELYKVREINDYHHAHDAYLNAVVVKALLVKYPKLEPEFVYGEYPKYNSYRERKTATQKMFFYSNIMNMFKSKVKLADDQIVERPMIEVNDETGEIAWDKTKHITTVKKVLSYPQVNIVKKVEEQTIGQNGGLFDDNPKSPLEVIPSKLVPLKKALNPEKYGGYQKPTTAYPILLIVDTKQLIPISVMDKKRFEQNPVKFLKDKGYQQIEKNNFVKLPKYTLVDIGNGIKRLWASSKEVHKGNQLVVSKKSQDLLYHAHHLDNDYSNEYVKNHYQQFDILFNEITSFSKKCKLGKEHIQKIEEAYSKERDFASIEELADGFIKLLGFTQLGATSPFSFLGIKLNQKQYTGKKDYLLPCMEATLIHQSITGLYETRIDLSKLGGD

SEQ ID NO: 696 - protein, 1355 aa, Streptococcus mutans; identical to SEQ ID NO: 695

SEQ ID NO: 697 - protein, 1345 aa, Streptococcus mutans
MKKPYSIGLDIGTNSVGWAVVTDDYKVPAKKMKVLGNTDKSHIKKNLLGALLFDSGNTAEDRRLKRTARRRYTRRRNRILYLQEIFSEEMDKVDDSFFHRLEDSFLVTEDKRGERHPIFGNLEEEVKYHENFPTIYHLRQYLADNPEKVDLRLVYLALAHIIKFRGHFLIEGKFDTRNNDVQRLFQEFLAVYDNTFENSSLQEQNVQVEEILTDKISKSAKKDRVLKLFPNEKSNGRFAEFLKLIVGNQADFKKHFELEEKAPLQFSKDTYEEELEVLLAQIGDNYAELFLSAKKLYDSILLSGILTVTDVSTKAPLSASMIQRYNEHQMDLAQLKQFIRQKLSDKYNEVFSDVSKDGYAGYIDGKTNQEAFYKYLKGLLNKIEGSGYFLDKIEREDFLRKQRTFDNGSIPHQIHLQEMRAIIRRQAEFYPFLADNQDRIEKILTFRIPYYVGPLARGKSDFAWLSRKSADKITPWNFDEIVDKESSAEAFINRMTNYDLYLPNQKVLPKHSLLYEKFTVYNELTKVKYKTEQGKTAFFDANMKQEIFDGVFKVYRKVTKDKLMDFLEKEFDEFRIVDLTGLDKENKVFNASYGTYHDLCKILDKDFLDNSKNEKILEDIVLTLTLFEDREMIRKRLENYSDLLTKEQVKKLERRHYTGWGRLSAELIHGIRNKESRKTILDYLIDDGNSNRNFMQLINDDALSFKEEIAKAQVIGETDNLNQVVSDIAGSPAIKKGILQSLKIVDELVKIMGHQPENIVVEMARENQFTKQGRRNSQQRLKGLTDSIKEFGSQILKEHPVENSQLQNDRLFLYYLQNGRDMYTGEELDIDYLSQYDIDHIIPQAFIKDNSIDNRVLTSSKENRGKSDDVPSKDVVRKMKSYWSKLLSAKLITQRKFDNLTKAERGGLTDDDKAGFIKRQLVETRQITKHVARILDERFYTETDENNKKIRQVKIVTLKSNLVSNFRKEFELYKVREINDYHHAHDAYLNAVIGKALLGVYPQLEPEFVYGDYPHFHGHKENKATAKKFFYSNIMNFFKKDDVRTDKNGEIIWKKDEHISNIKKVLSYPQVNIVKKVEEQTGGFSKESILPKGNSDKLIPRKTKKFYWDTKKYGGFDSPIVAYSILVIADIEKGKSKKLKTVKALVGVTIMEKMTFERDPVAFLERKGYRNVQEENIIKLPKYSLFKLENGRKRLLASARELQKGNEIVLPNHLGTLLYHAKNIHKVDEPKHLDYVDKHKDEFKELLDVVSNFSKKYTLAEGNLEKIKELYAQNNGEDLKELASSFINLLTFTAIGAPATFKFFDKNIDRKRYTSTTEILNATLIHQSITGLYETRIDLSKLGGD

SEQ ID NO: 698 - protein, 1345 aa, Streptococcus mutans; identical to SEQ ID NO: 697

SEQ ID NO: 699 - protein, 1345 aa, Streptococcus mutans
MKKPYSIGLDIGTNSVGWAVVTDDYKVPAKKMKVLGNTDKSHIKKNLLGALLFDSGNTAEDRRLKRTARRRYTRRRNRILYLQEIFSEEMGKVDDSFFHRLDESFLTDDDKNFDSHPIFGNKAEEDAYHQKFPTIYHLRKHLADSTEKADLRLVYLALAHMIKFRGHFLIEGELNAENTDVQKLFADFVGVYDRTFDDSHLSEITVDASSILTEKISKSRRLEKLINNYPKEKKNTLFGNLIALSLGLQPNFKTNFKLSEDAKLQFSKDTYEEELEVLLAQIGDNYAELFLSAKKLYDSILLSGILTVTDVSTKAPLSASMIQRYNEHQMDLAQLKQFIRQKLSDKYNEVFSDVSKDGYAGYIDGKTNQEAFYKYLKGLLNKIEGSGYFLDKIEREDFLRKQRTFDNGSIPHQIHLQEMRAIIRRQAEFYPFLADNQDRIEKILTFRIPYYVGPLARGKSDFAWLSRKSADKITPWNFDEIVDKESSVEAFINRMTNYDLYLPNQKVLPKHSLLYEKFTVYNELTKVKYKTEQGKTAFFDANMKQEIFDGVFKVYRKVTKDKLMDFLEKEFDEFRIVDLTGLDKENKAFNASYGTYHDLRKILDKDFLDNSKNEKILEDIVLTLTLFEDREMIRKRLKNYSDLLTKEQLKKLERRHYTGWGRLSAELIHGIRNKESRKTILDYLIDDGNSNRNFMQLINDDALSFKEEIAKAQVIGETDNLNQVVSDIAGSPAIKKGILQSLKIVDELVKIMGHQPENIVVEMARENQFTNQGRRNSQQRLKGLTDSIKEFGSQILKEHPVENSQLQNDRLFLYYLQNGRDMYTGEELDIDYLSQYDIDHIIPQAFIKDNSIDNRVLTSSKENRGKSDDVPSKDVVRKMKSYWSKLLSAKLITQRKFDNLTKGERGGLTDDDKAGFIKRQLVETRQITKHVARILDERFNTETDENNKKIRQVKIVTLKSNLVSNFRKEFELYKVREINDYHHAHDAYLNAVIGKALLGVYPQLEPEFVYGDYPHFHGHKENKATAKKFFYSNIMNFFKKDDVRTDKNGEIIWKKDEYISNIKKVLSYPQVNIVKKVEEQTGGFSKESILPKGDSDKLIPRKTKKFYWDTKKYGGFDSPIVAYSILVIADIEKGKSKKLKTVKALVGVTIMEKMTFERDPVAFLERKGYRNVQEENIIKLPKYSLFKLENGRKRLLASARELQKGNEIVLPNHLGTLLYHAKNIHKVDEPKHLDYVDKHKDEFKELLDVVSNFSKKYTLAEGNLEKIKELYAQNNGEDLKELASSFINLLTFTAIGAPATFKFFDKNIDRKRYTSTTEILNATLIHQSITGLYETRIDLSKLGGD

SEQ ID NO: 700 - protein, 1345 aa, Streptococcus mutans
MKKPYSIGLDIGTNSVGWAVVTDDYKVPAKKMKVLGNTDKSHIKKNLLGALLFDSGNTAEDRRLKRTARRRYTRRRNRILYLQEIFSEEMGKVDDSFFHRLDESFLTDDDKNFDSYPIFGNKAEEDAYHQKFPTIYHLRKHLADSTEKADLRLVYLALAHMIKFRGHFLIEGELNAENTDVQKLFADFVGVYDRTFDDSHLSEITVDASSILTEKISKSRRLEKLINNYPKEKKNTLFRNLVALSLGLQPNFKTNFKLSEDAKLQFSKDTYEEDLEELLGKIGDDYADLFTLAKNLYDAILLSGILTADDSSTKAPLSASMIKRYAEHHEDLEKLKEFIKANKPELYHDIFKDETKNGYAGYIENGVKQDEFYKYLKNTLSKIAGSDYFLDKIEREDFLRKQRTFDNGSIPHQIHLQEMHAILRRQGDYYPFLKENQDRIEKILTFRIPYYVGPLARGKSDFAWLSRKSADKITPWNFDEIVDKESSVEAFINRMTNYDLYLPNQKVLPKHSLLYEKFTVYNELTKVKYKTEQGKTAFFDANMKQEIFDGVFKVYRKVTKDKLMDFLEKEFDEFRIVDLTGLDKENKAFNASYGTYHDLRKILDKDFLDNSKNEKILEDIVLTLTLFEDREMIRKRLKNYSDLLTKEQLKKLERRHYTGWGRLSAELIHGIRNKESRKTILDYLIDDGNSNRNFMQLINDDALSFKEEIAKAQVIGETDNLNQVVSDIAGSPAIKKGILQSLKIVDELVKIMGHQPENIVVEMARENQFTNQGRRNSQQRLKGLTDSIKEFGSQILKEHPVENSQLQNDRLFLYYLQNGRDMYTGEELDIDYLSQYDIDHIIPQAFIKDNSIDNRVLTSSKENRGKSDDVPSKDVVRKMKSYWSKLLSAKLITQRKFDNLTKGERGGLTDDDKAGFIKRQLVETRQITKHVARILDERFNTETDENNKKIRQVKIVTLKSNLVSNFRKEFELYKVREINDYHHAHDAYLNAVIGKALLGVYPQLEPEFVYGDYPHFHGHKENKATAKKFFYSNIMNFFKKDDVRTDKNGEIIWKKDEYISNIKKVLSYPQVNIVKKVEEQTGGFSKESILPKGDSDKLIPRKTKKFYWDTKKYGGFDSPIVAYSILVIADIEKGKSKKLKTVKALVGVTIMEKMTFERDPVAFLERKGYRNVQEENIIKLPKYSLFKLENGRKRLLASARELQKGNEIVLPNHLGTLLYHAKNIHKVDEPKHLDYVDKHKDEFKELLDVVSNFSKKYTLAEGNLEKIKELYAQNNGEDLKELASSFINLLTFTAIGAPATFKFFDKNIDRKRYTSTTEILNATLIHQSITGLYETRIDLSKLGGD

SEQ ID NO: 701 - protein, 1345 aa, Streptococcus mutans; identical to SEQ ID NO: 700

SEQ ID NO: 702 - protein, 1345 aa, Streptococcus mutans
MKKPYSIGLDIGTNSVGWAVVTDDYKVPAKKMKVLGNTDKSHIKKNLLGALLFDSGNTAEDRRLKRTARRRYTRRRNRILYLQEIFSEEMGKVDDSFFHRLEDSFLVTEDKRGERHPIFGNLEEEVKYHENFPTIYHLRQYLADNPEKTDLRLVYLALAHIIKFGGHFLIEGKFDTRNNDVQRLFQEFLAVYDNTFENSSLQEQNVQVEEILTDKISKSAKKDRVLKLFPNEKSNGRFAEFLKLIVGNQADFKKHFELEEKAPLQFSKDIYEEELEVLLAQIGDNYAELFLSAKKLYDSILLSGILTVTDVSTKAPLSASMIQRYNEHQMDLAQLKQFIRQKLSDKYNEVFSDVSKDGYAGYIDGKTNQEAFYKYLKGLLNKIEGSGYFLDKIEREDFLRKQRTFDNGSIPHQIHLQEMRAIIRRQAEFYPFLADNQDRIEKILTFRIPYYVGPLARGKSDFAWLSRKSADKITPWNFDEIVDKESSVEAFINRMTNYDLYLPNQKVLPKHSLLYEKFTVYNELTKVKYKTEQGKTAFFDANMKQEIFDGVFKVYRKVTKDKLMDFLEKEFDEFRIVDLTGLDKENKAFNASYGTYHDLRKILDKDFLDNSKNEKILEDIVLTLTLFEDREMIRKRLKNYSDLLTKEQLKKLERRHYTGWGRLSAELIHGIRNKESRKTILDYLIDDGNSNRNFMQLINDDALSFKEEIAKAQVIGETDNLNQVVSDIAGSPAIKKGILQSLKIVDELVKIMGHQPENIVVEMARENQFTNQGRRNSQQRLKGLTDSIKEFGSQILKEHPVENSQLQNDRLFLYYLQNGRDMYTGEELDIDYLSQYDIDHIIPQAFIKDNSIDNRVLTSSKENRGKSDDVPSKNVVRKMKSYWSKLLSAKLITQRKFDNLTKAERGGLTDDDKAGFIKRQLVETRQITKHVARILDERFHTETDENNKKIRQVKIVTLKSNLVSNFRKEFELYKVREINDYHHAHDAYLNAVIGKALLGVYPQLEPEFVYGDYPHFHGHKENKATAKKFFYSNIMNFFKKDDVRTDKNGEIIWKKDEHISNIKKVLSYPQVNIVKKVEEQTGGFSKESILPKGNSDKLIPRKTKKFYWDTKKYGGFDSPIVAYSILVIADIEKGKSKKLKTVKALVGVTIMEKMTFERDPVAFLERKGYRNVQEENIIKLPKYSLFKLENGRKRLLASARELQKGNEIVLPNHLGTLLYHAKNIHKVDEPKHLDYVDKHKDEFKELLDVVSNFSKKYTLAEGNLEKIKELYAQNNGEDLKELASSFINLLTFTAIGAPATFKFFDKNIDRKRYTSTTEILNATLIHQSITGLYETRIDLSKLGGD

SEQ ID NO: 703 - protein, 1345 aa, Streptococcus mutans; identical to SEQ ID NO: 702

SEQ ID NO: 704 - protein, 1345 aa, Streptococcus mutans
MKKPYSIGLDIGTNSVGWAVVTDDYKVPAKKMKVLGNTDKSHIKKNLLGALLFDSGNTAEDRRLKRTARRRYTRRRNRILYLQEIFSEEMGKVDDSFFHRLEDSFLVTEDKRGERHPIFGNLEEEVKYHENFPTIYHLRQYLADNPEKTDLRLVYLALAHIIKFRGHFLIEGKFDTRNNDVQRLFQEFLAVYDNTFENSSLQEQNVQVEEILTDKISKSAKKDRVLKLFPNEKSNGRFAEFLKLIVGNQADFKKHFELEEKAPLQFSKDIYEEELEVLLAQIGDNYAELFLSAKKLYDSILLSGILTVTDVSTKAPLSASMIQRYNEHQMDLAQLKQFIRQKLSDKYNEVFSDVSKDGYAGYIDGKTNQEAFYKYLKGLLNKIEGSGYFLDKIEREDFLRKQRTFDNGSIPHQIHLQEMRAIIRRQAEFYPFLADNQDRIEKILTFRIPYYVGPLARGKSDFAWLSRKSADKITPWNFDEIVDKESSVEAFINRMTNYDLYLPNQKVLPKHSLLYEKFTVYNELTKVKYKTEQGKTAFFDANMKQEIFDGVFKVYRKVTKDKLMDFLEKEFDEFRIVDLTGLDKENKAFNASYGTYHDLRKILDKDFLDNSKNEKILEDIVLTLTLFEDREMIRKRLKNYSDLLTKEQLKKLERRHYTGWGRLSAELIHGIRNKESRKTILDYLIDDGNSNRNFMQLINDDALSFKEEIAKAQVIGETDNLNQVVSDIAGSPAIKKGILQSLKIVDELVKIMGHQPENIVVEMARENQFTNQGRRNSQQRLKGLTDSIKEFGSQILKEHPVENSQLQNDRLFLYYLQNGRDMYTGEELDIDYLSQYDIDHIIPQAFIKDNSIDNRVLTSSKENRGKSDDVPSKNVVRKMKSYWSKLLSAKLITQRKFDNLTKAERGGLTDDDKAGFIKRQLVETRQITKHVARILDERFHTETDENNKKIRQVKIVTLKSNLVSNFRKEFELYKVREINDYHHAHDAYLNAVIGKALLGVYPQLEPEFVYGDYPHFHGHKENKATAKKFFYSNIMNFFKKDDVRTDKNGEIIWKKDEHISNIKKVLSYPQVNIVKKVEEQTGGFSKESILPKGNSDKLIPRKTKKFYWDTKKYGGFDSPIVAYSILVIADIEKGKSKKLKTVKALVGVTIMEKMTFERDPVAFLERKGYRNVQEENIIKLPKYSLFKLENGRKRLLASARELQKGNEIVLPNHLGTLLYHAKNIHKVDEPKHLDYVDKHKDEFKELLDVVSNFSKKYTLAEGNLEKIKELYAQNNGEDLKELASSFINLLTFTAIGAPATFKFFDKNIDRKRYTSTTEILNATLIHQSITGLYETRIDLSKLGGD

SEQ ID NO: 705 - protein, 1345 aa, Streptococcus mutans
MKKPYSIGLDIGTNSVGWAVVTDDYKVPAKKMKVLGNTDKSHIKKNLLGALLFDSGNTAEDRRLKRTARRRYTRRRNRILYLQEIFSEEMGKVDDSFFHRLEDSFLVTEDKRGERHPIFGNLEEEVKYHENFPTIYHLRQYLADNPEKTDLRLVYLALAHIIKFRGHFLIEGKFDTRNNDVQRLFQEFLAVYDNTFENSSLQEQNVQVEEILTDKISKSAKKDRVLKLFPNEKSNGRFAEFLKLIVGNQADFKKHFELEEKAPLQFSKDIYEEELEVLLAQIGDNYAELFLSAKKLYDSILLSGILTVTDVSTKAPLSASMIQRYNEHQMDLAQLKQFIRQKLSDKYNEVFSDVSKDGYAGYIDGKTNQEAFYKYLKGLLNKIEGSGYFLDKIEREDFLRKQRTFDNGSIPHQIHLQEMRAIIRRQAEFYPFLADNQDRIEKILTFRIPYYVGPLARGKSDFAWLSRKSADKITPWNFDEIVDKESSVEAFINRMTNYDLYLPNQKVLPKHSLLYEKFTVYNELTKVKYKTEQGKTAFFDANMKQEIFDGVFKVYRKVTKDKLMDFLEKEFDEFRIVDLTGLDKENKAFNASYGTYHDLRKILDKDFLDNSKNEKILEDIVLTLTLFEDREMIRKRLKNYSDLLTKEQLKKLERRHYTGWGRLSAELIHGIRNKESRKTILDYLIDDGNSNRNFMQLINDDALSFKEEIAKAQVIGETDNLNQVVSDIAGSPAIKKGILQSLKIVDELVKIMGHQPENIVVEMARENQFTNQGRRNSQQRLKGLTDSIKEFGSQILKEHPVENSQLQNDRLFLYYLQNGRDMYTGEELDIDYLSQYDIDHIIPQAFIKDNSIDNRVLTSSKENRGKSDDVPSKDVVRKMKSYWSKLLSAKLITQRKFDNLTKAERGGLTDDDKAGFIKRQLVETRQITKHVARILDERFNTETDENNKKIRQVKIVTLKSNLVSNFRKEFELYKVREINDYHHAHDAYLNAVIGKALLGVYPQLEPEFVYGDYPHFHGHKENKATAKKFFYSNIMNFFKKDDVRTDKNGEIIWKKDEHISNIKKVLSYPQVNIVKKVEEQTGGFSKESILPKGNSYKLIPRKTKKFYWDTKKYGGFDSPIVAYSILVIADIEKGKSKKLKTVKALVGVTIMEKMTFERDPVAFLERKGYRNVQEENIIKLPKYSLFKLENGRKRLLASARELQKGNEIVLPNHLGTLLYHAKNIHKVDEPKHLDYVDKHKDEFKELLDVVSNFSKKYTLAEGNLEKIKELYAQNNGEDLKELASSFINLLTFTAIGAPAAFKFFDKNIDRKRYTSTTEILNATLIHQSITGLYETRIDLSKLGGD

SEQ ID NO: 706 - protein, 1345 aa, Streptococcus mutans
MKKPYSIGLDIGTNSVGWAVVTDDYKVPAKKMKVLGNTDKSHIKKNLLGALLFDSGNTAEDRRLKRTARRRYTRRRNRILYLQEIFSEEMGKVDDSFFHRLEDSFLVTEDKRGERHPIFGNLEEEVKYHENFPTIYHLRQYLADNPEKTDLRLVYLALAHIIKFRGHFLIEGKFDTRNNDVQRLFQEFLAVYDNTFENSSLQEQNVQVEEILTDKISKSAKKDRVLKLFPNEKSNGRFAEFLKLIVGNQADFKKHFELEEKAPLQFSKDIYEEELEVLLAQIGDNYAELFLSAKKLYDSILLSGILTVTDVSTKAPLSASMIQRYNEHQMDLAQLKQFIRQKLSDKYNEVFSDVSKDGYAGYIDGKTNQEAFYKYLKGLLNKIEGSGYFLDKIEREDFLRKQRTFDNGSIPHQIHLQEMRAIIRRQAEFYPFLADNQDRIEKILTFRIPYYVGPLARGKSDFAWLSRKSADKITPWNFDEIVDKESSAEAFINRMTNYDLYLPNQKVLPKHSLLYEKFTVYNELTKVKYKTEQGKTAFFDANMKQEIFDGVFKVYRKVTKDKLMDFLEKEFDEFRIVDLTGLDKENKAFNASYGTYHDLRKILDKDFLDNSKNEKILEDIVLTLTLFEDREMIRKRLKNYSDLLTKEQLKKLERRHYTGWGRLSAELIHGIRNKESRKTILDYLIDDGNSNRNFMQLINDDALSFKEEIAKAQVIGETDNLNQVVSDIAGSLAIKKGILQSLKIVDELVKIMGHQPENIVVEMARENQFTNQGRRNSQQRLKGLTDSIKEFGSQILKEHPVENSQLQNDRLFLYYLQNGRDMYTGEELDIDYLSQYDIDHIIPQAFIKDNSIDNRVLTSSKENRGKSDDVPSKDVVRKMKSYWSKLLSAKLITQRKFDNLTKGERGGLTDDDKAGFIKRQLVETRQITKHVARILDERFNTETDENNKKIRQVKIVTLKSNLVSNFRKEFELYKVREINDYHHAHDAYLNAVIGKALLGVYPQLEPEFVYGDYPHFHGHKENKATAKKFFYSNIMNFFKKDDVRTDKNGEIIWKKDEYISNIKKVLSYPQVNIVKKVEEQTGGFFKESILPKGDSDKLIPRKTKKFYWDTKKYGGFDSPIVAYSILVIADIEKGKSKKLKTVKALVGVTIMEKMTFERDPVAFLERKGYRNVQEENIIKLPKYSLFKLENGRKRLLASARELQKGNEIVLPNHLGTLLYHAKNIHKVDEPKHLDYVDKHKDEFKELLDVVSNFSKKYTLAEGNLEKIKELYAQNNGEDLKELASSFINLLTFTAIGAPATFKFFDKNIDRKRYTSTTEILNATLIHQSITGLYETRIDLSKLGGD

SEQ ID NO: 707 - protein, 1345 aa, Streptococcus mutans
MKKPYSIGLDIGTNSVGWAVVTDDYKVPAKKMKVLGNTDKSHIKKNLLGALLFDSGNTAEDRRLKRTARRRYTRRRNRILYLQEIFSEEMGKVDDSFFHRLEDSFLVTEDKRGERHPIFGNLEEEVKYHENFPTIYHLRQYLADNPEKTDLRLVYLALAHIIKFRGHFLIEGKFDTRNNDVQRLFQEFLAVYDNTFENSSLQEQNVQVEEILTDKISKSAKKDRVLKLFPNEKSNGRFAEFLKLIVGNQADFKKHFELEEKAPLQFSKDIYEEELEVLLAQIGDNYAELFLSAKKLYDSILLSGILTVTDVSTKAPLSASMIQRYNEHQMDLAQLKQFIRQKLSDKYNEVFSDVSKDGYAGYIDGKTNQEAFYKYLKGLLNKIEGSGYFLDKIEREDFLRKQRTFDNGSIPHQIHLQEMRAIIRRQAEFYPFLADNQDRIEKILTFRIPYYVGPLARGKSDFAWLSRKSADKITPWNFDEIVDKESSVEAFINRMTNYDLYLPNQKVLPKHSLLYEKFTVYNELTKVKYKTEQGKTAFFDANMKQEIFDGVFKVYRKVTKDKLMDFLEKEFDEFRIVDLTGLDKENKAFNASYGTYHDLRKILDKDFLDNSKNEKILEDIVLTLTLFEDREMIRKRLKNYSDLLTKEQLKKLERRHYTGWGRLSAELIHGIRNKESRKTILDYLIDDGNSNRNFMQLINDDALSFKEEIAKAQVIGETDNLNQVVSDIAGSPAIKKGILQSLKIVDELVKIMGHQPENIVVEMARENQFTNQGRRNSQQRLKGLTDSIKEFGSQILKEHPVENSQLQNDRLFLYYLQNGRDMYTGEELDIDYLSQYDIDHIIPQAFIKDNSIDNRVLTSSKENRGKSDDVPSKDVVRKMKSYWSKLLSAKLITQRKFDNLTKAERGGLTDDDKAGFIKRQLVETRQITKHVARILDERFNTETDENNKKIRQVKIVTLKSNLVSNFRKEFELYKVREINDYHHAHDAYLNAVIGKALLGVYPQLEPEFVYGDYPHFHGHKENKATAKKFFYSNIMNFFKKDDVRTDKNGEIIWKKDEHISNIKKVLSYPQVNIVKKVEEQTGGFSKESILPKGNSDKLIPRKTKKFYWDTKKYGGFDSPIVAYSILVIADIEKGKSKKLKTVKALVGVTIMEKMTFERDPVAFLERKGYRNVQEENIIKLPKYSLFKLENGRKRLLASARELQKGNEIVLPNHLGTLLYHAKNIHKVDEPKHLDYVDKHKDEFKELLDVVSNFSKKYTLAEGNLEKIKELYAQNNGEDLKELASSFINLLTFTAIGAPATFKFFDKNIDRKRYTSTTEILNATLIHQSITGLYETRIDLNKLGGD

SEQ ID NO: 708 - protein, 1345 aa, Streptococcus mutans; identical to SEQ ID NO: 707

SEQ ID NO: 709 - protein, 1345 aa, Streptococcus mutans; identical to SEQ ID NO: 704

SEQ ID NO: 710 - protein, 1345 aa, Streptococcus mutans; identical to SEQ ID NO: 705

SEQ ID NO: 711 - protein, 1345 aa, Streptococcus mutans; identical to SEQ ID NO: 706

SEQ ID NO: 712 - protein, 1345 aa, Streptococcus mutans
MKKPYSIGLDIGTNSVGWAVVTDDYKVPAKKMKVLGNTDKSHIKKNLLGALLFDSGNTAEDRRLKRTARRRYTRRRNRILYLQEIFSEEMGKVDDSFFHRLEDSFLVTEDKRGERHPIFGNLEEEVKYHENFPTIYHLRQYLADNPEKVDLRLVYLALAHIIKFRGHFLIEGKFDTRNNDVQKLFQEFLAVYDNTFENSSLQEQNVQVEEILTDKISKSAKKDRVLKLFPNEKSNGRFAEFLKLIVGNQADFKKHFELEEKAPLQLSKDTYEEELEVLLAQIGDNYAELFLSAKKLYDSILLSGILTVTDVSTKAPLSASMIQRYNEHQMDLAQLKQFIRQKLSDKYNEVFSDVSKDGYAGYIDGKTNQEAFYKYLKGLLNKIEGSGYFLDKIEREDFLRKQRTFDNGSIPHQIHLQEMRAIIRRQAEFYPFLADNQDRIEKILTFRIPYYVGPLARGKSDFAWLSRKSADKITPWNFDEIVDKESSVEAFINRMTNYDLYLPNQKVLPKHSLLYEKFTVYNELTKVKYKTEQGKTAFFDANMKQEIFDGVFKVYRKVTKDKLMDFLEKEFDEFRIVDLTGLDKENKAFNASYGTYHDLRKILDKDFLDNSKNEKILEDIVLTLTLFEDREMIRKRLENYSDLLTKEQVKKLERRHYTGWGRLSAELIHGIRNKESRKTLLDYLIDDGNSNRNFMQLINDDALSFKEEIAKAQVIGETDNLNQVVSDIAGSPAIKKGILQSLKIVDELVKIMGHQPENIVVEMARENQFTNQGRRNSQQRLKGLTDSIKEFGSQILKEHPVENSQLQNDRLFLYYLQNGRDMYTGEELDIDYLSQYDIDHIIPQAFIKDNSIDNRVLTSSKENRGKSDDVPSKDVVRKMKSYWSKLLSAKLITQRKFDNLTKAERGGLTDDDKAGFIKRQLVETRQITKHVARILDERFNTETDENNKKIRQVKIVTLKSNLVSNFRKEFELYKVREINDYHHAHDAYLNAVIGKALLGVYPQLEPEFVYGDYPHFHGHKENKATAKKFFYSNIMNFFKKDDVRTDKNGEIIWKKDEYISNIKKVLSYPQVNIVKKVEEQTGGFSKESILPKGNSDKLIPRKTKKFYWDTKKYGGFDSPIVAYSILVIADIEKGKSKKLKTVKALVGVTIMEKMTFERDPIAFLERKGYRNVQEENIIKLPKYSLFKLENGRKRLLASARELQKGNEIVLPNHLGTLLYHAKNIHKVDEPKHLDYVDKHKDEFKELLDVVSNFSKKYTLAEGNLEKIKELYAQNNGEDLKELASSFINLLTFTAIGAPATFKFFDKNIDRKRYTSTTEILNATLIHQSITGLYETRIDLSKLGGD

SEQ ID NO: 713 - protein, 1345 aa, Streptococcus mutans; identical to SEQ ID NO: 712

SEQ ID NO: 714 - protein, 1345 aa, Streptococcus mutans
MKKPYSIGLDIGTNSVGWAVVTDDYKVPAKKMKVLGNTDKSHIKKNLLGALLFDSGNTAEDRRLKRTARRRYTRRRNRILYLQEIFSEEMGKVDDSFFHRLEDSFLVTEDKRGERHPIFGNLEEEVKYHENFPTIYHLRQYLADNPEKVDLRLVYLALAHIIKFRGHFLIEGKFDTRNNDVQRLFQEFLAVYDNTFENSSLQEQNVQVEEILTDKISKSAKKDRVLKLFPNEKSNGRFAEFLKLIVGNQADFKKHFELEEKAPLQFSKDTYEEDLEELLGKIGDDYADLFTLAKNLYDAILLSGILTADDSSTKAPLSASMIQRYNEHQMDLAQLKQFIRQKLSDKYNEVFSDVSKDGYAGYIDGKTNQEAFYKYLKGLLNKIEGSGYFLDKIEREDFLRKQRTFDNGSIPHQIHLQEMRAIIRRQAEFYPFLADNQDRIEKILTFRIPYYVGPLARGKSDFAWLSRKSADKITPWNFDEIVDKESSAEAFINRMTNYDLYLPNQKVLPKHSLLYEKFTVYNELTKVKYKTEQGKTAFFDANMKQEIFDGVFKVYRKVTKDKLMDFLEKEFDEFRIVDLTGLDKENKVFNASYGTYHDLCKILDKDFLDNSKNEKILEDIVLTLTLFEDREMIRKRLENYSDLLTKEQVKKLERRHYTGWGRLSAELIHGIRNKESRKTILDYLIDDGNSNRNFMQLINDDALSFKEEIAKAQVIGETDNLNQVVSDIAGSPAIKKGILQSLKIVDELVKIMGHQPENIVVEMARENQFTNQGRRNSQQRLKGLTDSIKEFGSQILKEHPVENSQLQNDRLFLYYLQNGRDMYTGEELDIDYLSQYDIDHIIPQAFIKDNSIDNRVLTSSKENRGKSDDVPSKDVVRKMKSYWSKLLSAKLITQRKFDNLTKAERGGLTDDDKAGFIKRQLVETRQITKHVARILDERFYTETDENNKKIRQVKIVTLKSNLVSNFRKEFELYKVREINDYHHAHDAYLNAVIGKALLGVYPQLEPEFVYGDYPHFHGHKENKATAKKFFYSNIMNFFKKDDVRTDKNGEIIWKKDEHISNIKKVLSYPQVNIVKKVEEQTGGFSKESILPKGNSDKLIPRKTKKFYWDTKKYGGFDSPIVAYSILVIADIEKGKSKKLKTVKALVGVTIMEKMTFERDPVAFLERKGYRNVQEENIIKLPKYSLFKLENGRKRLLASARELQKGNEIVLPNHLGTLLYHAKNIHKVDEPKHLDYVDKHKDEFKELLDVVSNFSKKYTLAEGNLEKIKELYAQNNGEDLKELASSFINLLTFTAIGAPATFKFFDKNIDRKRYTSTTEILNATLIHQSITGLYETRIDLSKLGGD

SEQ ID NO: 715 - protein, 1345 aa, Streptococcus mutans
MKKPYSIGLDIGTNSVGWAVVTDDYKVPAKKMKVLGNTDKSHIKKNLLGALLFDSGNTAEDRRLKRTARRRYTRRRNRILYLQEIFSEEMGKVDDSFFHRLEDSFLVTEDKRGERHPIFGNLEEEVKYHENFPTIYHLRQYLADNPEKVDLRLVYLALAHIIKFRGHFLIEGKFDTRNNDVQRLFQEFLAVYDNTFENSSLQEQNVQVEEILTDKISKSAKKDRVLKLFPNEKSNGRFAEFLKLIVGNQADFKKHFELEEKAPLQFSKDTYEEDLEELLGKIGDDYADLFTLAKNLYDAILLSGILTADDSSTKAPLSASMIQRYNEHQMDLAQLKQFIRQKLSDKYNEVFSDVSKDGYAGYIDGKTNQEAFYKYLKGLLNKIEGSGYFLDKIEREDFLRKQRTFDNGSIPHQIHLQEMRAIIRRQAEFYPFLADNQDRIEKILTFRIPYYVGPLARGKSDFAWLSRKSADKITPWNFDEIVDKESSAEAFINRMTNYDLYLPNQKVLPKHSLLYEKFTVYNELTKVKYKTEQGKTAFFDANMKQEIFDGVFKVYRKVTKDKLMDFLEKEFDEFRIVDLTGLDKENKVFNASYGTYHDLCKILDKDFLDNSKNEKILEDIVLTLTLFEDREMIRKRLENYSDLLTKEQVKKLERRHYTGWGRLSAELIHGIRNKESRKTILDYLIDDGNSNRNFMQLINDDALSFKEEIAKAQVIGETDNLNQVVSDIAGSPAIKKGILQSLKIVDELVKIMGHQPENIVVEMARENQFTNQGRRNSQQRLKGLTDSIKEFGSQILKEHPVENSQLQNDRLFLYYLQNGRDMYTGEELDIDYLSQYDIDHIIPQAFIKDNSIDNRVLTSSKENRGKSDDVPSKDVVRKMKPYWSKLLSAKLITQRKFDNLTKAERGGLTDDDKAGFIKRQLVETRQITKHVARILDERFNTETDENNKKIRQVKIVTLKSNLVSNFRKEFELYKVREINDYHHAHDAYLNAVIGKALLGVYPQLEPEFVYGDYPHFHGHEENKATAKKFFYSNIMNFFKKDDVRTDKNGEIIWKKDEHISNIKKVLSYPQVNIVKKVEEQTGGFSKESILPKGNSDKLIPRKTKKFYWDTKKYGGFDSPIVAYSILVIADIEKGKSKKLKTVKALVGVTIMEKMTFERDPVAFLERKGYRNVQEENIIKLPKYSLFKLENGRKRLLASARELQKGNEIVLPNHLGTLLYHAKNIHKVDEPKHLDYVDKHKDEFKELLDVVSNFSKKYTLAEGNLEKIKELYAQNNGEDLKELASSFINLLTFTAIGAPATFKFFDKNIDRKRYTSTTEILNATLIHQSITGLYETRIDLSKLGGD

SEQ ID NO: 716 - protein, 1345 aa, Streptococcus mutans
MKKPYSIGLDIGTNSVGWAVVTDDYKVPAKKMKVLGNTDKSHIKKNLLGALLFDSGNTAEDRRLKRTARRRYTRRRNRILYLQEIFSEEMGKVDDSFFHRLEDSFLVTEDKRGERHPIFGNLEEEVKYHENFPTIYHLRQYLADNPEKVDLRLVYLALAHIIKFRGHFLIEGKFDTRNNDVQRLFQEFLAVYDNTFENSSLQEQNVQVEEILTDKISKSAKKDRVLKLFPNEKSNGRFAEFLKLIVGNQADFKKHFELEEKAPLQFSKDTYEEELEVLLAQIGDNYAELFLSAKKLYDSILLSGILTVTDVSTKAPLSASMIQRYNEHQMDLAQLKQFIRQKLSDKYNEVFSDVSKDGYAGYIDGKTNQEAFYKYLKGLLNKIEGSGYFLDKIEREDFLRKQRTFDNGSIPHQIHLQEMRAIIRRQAEFYPFLADNQDRIEKILTFRIPYYVGPLARGKSDFAWLSRKSADKITPWNFDEIVDKESSAEAFINRMTNYDLYLPNQKVLPKHSLLYEKFTVYNELTKVKYKTEQGKTAFFDANMKQEIFDGVFKVYRKVTKDKLMDFLEKEFDEFRIVDLTGLDKENKVFNASYGTYHDLCKILDKDFLDNSKNEKILEDIVLTLTLFEDREMIRKRLENYSDLLTKEQVKKLERRHYTGWGRLSAELIHGIRNKESRKTILDYLIDDGNSNRNFMQLINDDALSFKEEIAKAQVIGETDNLNQVVSDIAGSPAIKKGILQSLKIVDELVKIMGHQPENIVVEMARENQFTKQGRRNSQQRLKGLTDSIKEFGSQILKEHPVENSQLQNDRLFLYYLQNGRDMYTGEELDIDYLSQYDIDHIIPQAFIKDNSIDNRVLTSSKENRGKSDDVPSKDVVRKMKSYWSKLLSAKLITQRKFDNLTKAERGGLTDDDKAGFIKRQLVETRQITKHVARILDERFYTETDENNKKIRQVKIVTLKSNLVSNFRKEFELYKVREINDYHHAHDAYLNAVIGKALLGVYPQLEPEFVYGDYPHFHGHKENKATAKKFFYSNIMNFFKKDDVRTDKNGEIIWKKDEHISNIKKVLSYPQVNIVKKVEEQTGGFSKESILPKGNSDKLIPRKTKKFYWDTKKYGGFDSPIVAYSILVIADIEKGKSKKLKTVKALVGVTIMEKMTFERDPVAFLERKGYRNVQEENIIKLPKYSLFKLENGRKRLLASARELQKGNEIVLPNHLGTLLYHAKNIHKVDEPKHLDYVDKHKDEFKELLDVVSNFSKKYTLAEGNLEKIKELYAQNNGEDLKELASSFINLLTFTAIGAPATFKFFDKNIDRKRYTSTTEILNATLIHQSITGLYETRIDLSKLGGD

SEQ ID NO: 717 - protein, 1345 aa, Streptococcus mutans
MKKPYSIGLDIGTNSVGWAVVTDDYKVPAKKMKVLGNTDKSHIKKNLLGALLFDSGNTAEDRRLKRTARRRYTRRRNRILYLQEIFSEEMGKVDDSFFHRLEDSFLVTEDKRGERHPIFGNLEEEVKYHENFPTIYHLRQYLADNPEKVDLRLVYLALAHIIKFRGHFLIEGKFDTRNNDVQRLFQEFLAVYDNTFENSSLQEQNVQVEEILTDKISKSAKKDRVLKLFPNEKSNGRFAEFLKLIVGNQADFKKHFELEEKAPLQFSKDTYEEELEVLLAQIGDNYAELFLSAKKLYDSILLSGILTVTDVSTKAPLSASMIQRYNEHQMDLAQLKQFIRQKLSDKYNEVFSDVSKDGYAGYIDGKTNQEAFYKYLKGLLNKIEGSGYFLDKIEREDFLRKQRTFDNGSIPHQIHLQEMRAIIRRQAEFYPFLADNQDRIEKILTFRIPYYVGPLARGKSDFAWLSRKSADKITPWNFDEIVDKESSAEAFINRMTNYDLYLPNQKVLPKHSLLYEKFTVYNELTKVKYKTEQGKTAFFDANMKQEIFDGVFKVYRKVTKDKLMDFLEKEFDEFRIVDLTGLDKENKVFNASYGTYHDLCKILDKDFLDNSKNEKILEDIVLTLTLFEDREMIRKRLENYSDLLTKEQVKKLERRHYTGWGRLSAELIHGIRNKESRKTILDYLIDDGNSNRNFMQLINDDALSFKEEIAKAQVIGETDNLNQVVSDIAGSPAIKKGILQSLKIVDELVKIMGHQPENIVVEMARENQFTKQGRRNSQQRLKGLTDSIKEFGSQILKEHPVENSQLQNDRLFLYYLQNGRDMYTGEELDIDYLSQYDIDHIIPQAFIKDNSIDNRVLTSSKENRGKSDDVPSKDVVRKMKSYWSKLLSAKLITQRKFDNLTKAERGGLTDDDKAGFIKRQLVETRQITKHVARILDERFYTETDENNKKIRQVKIVTLKSNLVSNFRKEFELYKVREINDYHHAHDAYLNAVIGKALLGVYPQLEPEFVYGDYPHFHGHKENKATAKKFFYSNIMNFFKKDDVRTDRNGEIIWKKDEHISNIKKVLSYPQVNIVKKVEEQTGGFSKESILPKGNSDKLIPRKTKKFYWDTKKYGGFDSPIVAYSILVIADIEKGKSKKLKTVKALVGVTIMEKMTFERDPVAFLERKGYRNVQEENIIKLPKYSLFKLENGRKRLLASARELQKGNEIVLPNHLGTLLYHAKNIHKVDEPKHLDYVDKHKDEFKELLDVVSNFSKKYTLAEGNLEKIKELYAQNNGEDLKELASSFINLLTFTAIGAPATFKFFDKNIDRKRYTSTTEILNATLIHQSITGLYETRIDLSKLGGD

SEQ ID NO: 718 - protein, 1345 aa, Streptococcus mutans
MKKPYSIGLDIGTNSVGWAVVTDDYKVPAKKMKVLGNTDKSHIKKNLLGALLFDSGNTAEDRRLKRTARRRYTRRRNRILYLQEIFSEEMGKVDDSFFHRLEDSFLVTEDKRGERHPIFGNLEEEVKYHENFPTIYHLRQYLADNPEKVDLRLVYLALAHIIKFRGHFLIEGKFDTRNNDVQRLFQEFLAVYDNTFENSSLQEQNVQVEEILTDKISKSAKKDRVLKLFPNEKSNGRFAEFLKLIVGNQADFKKHFELEEKAPLQFSKDTYEEELEVLLAQIGDNYAELFLSAKKLYDSILLSGILTVTDVSTKAPLSASMIQRYNEHQMDLAQLKQFIRQKLSDKYNEVFSDVSKDGYAGYIDGKTNQEAFYKYLKGLLNKIEGSGYFLDKIEREDFLRKQRTFDNGSIPHQIHLQEMRAIIRRQAEFYPFLADNQDRIEKILTFRIPYYVGPLARGKSDFAWLSRKSADKITPWNFDEIVDKESSAEAFINRMTNYDLYLPNQKVLPKHSLLYEKFTVYNELTKVKYKTEQGKTAFFDANMKQEIFDGVFKVYRKVTKDKLMDFLEKEFDEFRIVDLTGLDKENKVFNASYGTYHDLCKILDKDFLDNSKNEKILEDIVLTLTLFEDREMIRKRLENYSDLLTKEQVKKLERRHYTGWGRLSAELIHGIRNKESRKTILDYLIDDGNSNRNFMQLINDDALSFKEEIAKAQVIGETDNLNQVVSDIAGSPAIKKGILQSLKIVDELVKIMGHQPENIVVEMARENQFTNQGRQNSQQRLKGLTDSIKEFGSQILKEHPVENSQLQNDRLFLYYLQNGRDMYTGEELDIDYLSQYDIDHIIPQAFIKDNSIDNRVLTSSKENRGKSDDVPSEDVVRKMKSYWSKLLSAKLITQRKFDNLTKAERGGLTDDDKAGFIKRQLVETRQITKHVARILDERFYTETDENNKKIRQVKIVTLKSNLVSNFRKEFELYKVREINDYHHAHDAYLNAVIGKALLGVYPQLEPEFVYGDYPHFHGHKENKATAKKFFYSNIMNFFKKDDVRTDKNGEIIWKKDEHISNIKKVLSYPQVNIVKKVEEQTGGFSKESILPKGNSDKLIPRKTKKFYWDTKKYGGFDSPIVAYSILVIADIEKGKSKKLKTVKALVGVTIMEKMTFERDPVAFLERKGYRNVQEENIIKLPKYSLFKLENGRKRLLASARELQKGNEIVLPNHLGTLLYHAKNIHKVDEPKHLDYVDKHKDEFKELLDVVSNFSKKYTLAEGNLEKIKELYAQNNGEDLKELASSFINLLTFTAIGAPATFKFFDKNIDRKRYTSTTEILNATLIHQSITGLYETRIDLSKLGGD

SEQ ID NO: 719 - protein, 1345 aa, Streptococcus mutans; identical to SEQ ID NO: 718

SEQ ID NO: 720 - protein, 1345 aa, Streptococcus mutans; identical to SEQ ID NO: 714

SEQ ID NO: 721 - protein, 1345 aa, Streptococcus mutans; identical to SEQ ID NO: 715

SEQ ID NO: 722 - protein, 1345 aa, Streptococcus mutans; identical to SEQ ID NO: 716

SEQ ID NO: 723 - protein, 1345 aa, Streptococcus mutans; identical to SEQ ID NO: 717

SEQ ID NO: 724 - protein, 1345 aa, Streptococcus mutans; identical to SEQ ID NO: 716

SEQ ID NO: 725 - protein, 1345 aa, Streptococcus mutans; identical to SEQ ID NO: 716

SEQ ID NO: 726 - protein, 1345 aa, Streptococcus mutans; identical to SEQ ID NO: 716

SEQ ID NO: 727 - protein, 1345 aa, Streptococcus mutans; identical to SEQ ID NO: 717

SEQ ID NO: 728 - protein, 1345 aa, Streptococcus mutans
MKKPYSIGLDIGTNSVGWAVVTDDYKVPAKKMKVLGNTDKSHIKKNLLGALLFDSGNTAEDRRLKRTARRRYTRRRNRILYLQEIFSEEMGKVNDSFFHRLEDSFLVTEDKRGERHPIFGNLEEEVKYHENFPTIYHLRQYLADNPEKVDLRLVYLALAHIIKFRGHFLIEGKFDTRNNDVQRLFQEFLAVYDNTFENSSLQEQNVQVEEILTDKISKSAKKDRVLKLFPNEKSNGRFAEFLKLIVGNQADFKKHFELEEKAPLQFSKDTYEEELEVLLAQIGDNYAELFLSAKKLYDSILLSGILTVTDVSTKAPLSASMIQRYNEHQMDLAQLKQFIRQKLSDKYNEVFSDVSKDGYAGYIDGKTNQEAFYKYLKGLLNKIEGSGYFLDKIEREDFLRKQRTFDNGSIPHQIHLQEMRAIIRRQAEFYPFLADNQDRIEKILTFRIPYYVGPLARGKSDFAWLSRKSADKITPWNFDEIVDKESSAEAFINRMTNYDLYLPNQKVLPKHSLLYEKFTVYNELTKVKYKTEQGKTAFFDANMKQEIFDGVFKVYRKVTKDKLMDFLEKEFDEFRIVDLTGLDKENKVFNASYGTYHDLCKILDKDFLDNSKNEKILEDIVLTLTLFEDREMIRKRLENYSDLLTKEQVKKLERRHYTGWGRLSAELIHGIRNKESRKTILDYLIDDGNSNRNFMQLINDDALSFKEEIAKAQVIGETDNLNQVVSDIAGSPAIKKGILQSLKIVDELVKIMGHQPENIVVEMARENQFTKQGRRNSQQRLKGLTDSIKEFGSQILKEHPVENSQLQNDRLFLYYLQNGRDMYTGEELDIDYLSQYDIDHIIPQAFIKDNSIDNRVLTSSKENRGKSDDVPSKDVVRKMKSYWSKLLSAKLITQRKFDNLTKAERGGLTDDDKAGFIKRQLVETRQITKHVARILDERFYTETDENNKKIRQVKIVTLKSNLVSNFRKEFELYKVREINDYHHAHDAYLNAVIGKALLGVYPQLEPEFVYGDYPHFHGHKENKATAKKFFYSNIMNFFKKDDVRTDKNGEIIWKKDEYISNIKKVLSYPQVNIVKKVEEQTGGFSKESILPKGNSDKLIPRKTKKFYWDTKKYGGFDSPIVAYSILVIADIEKGKSKKLKTVKALVGVTIMEKMTFERDPIAFLERKGYRNVQEENIIKLPKYSLFKLENGRKRLLASARELQKGNEIVLPNHLGTLLYHAKNIHKVDEPKHLDYVDKHKDEFKELLDVVSNFSKKYTLAEGNLEKIKELYAQNNGEDLKELASSFINLLTFTAIGAPAAFKFFDKNIDRKRYTSTTEILNATLIHQSITGLYETRIDLSKLGGD

SEQ ID NO: 729 - protein, 1345 aa, Streptococcus mutans; identical to SEQ ID NO: 728

SEQ ID NO: 730 - protein, 1345 aa, Streptococcus mutans
MKKPYSIGLDIGTNSVGWAVVTDDYKVPAKKMKVLGNTDKSHIKKNLLGALLFDSGNTAEDRRLKRTTRRRYTRRRNRILYLQEIFSEEMGKVDDSFFHRLEDSFLVTEDKRGERHPIFGNLEEEVKYHENFPTIYHLRQYLADNPEKTDLRLVYLALAHIIKFRGHFLIEGKFDTRNNDVQRLFQEFLAVYDNTFENSSLQEQNVQVEEILTDKISKSAKKDRVLKLFPNEKSNGCFAEFLKLIVGNQADFKKHFELEEKAPLQFSKDTYEEELEVLLAQIGDNYAELFLSAKKLYDSILLSGILTVTDVSTKAPLSASMIQRYNEHQMDLTQLKQFIRQKLSDKYNEVFSDVSKDGYAGYIDGKTNQEAFYKYLKGLLNKIEGSGYFLDKIEREDFLRKQRTFDNGSIPHQIHLQEMRAIIRRQAEFYPFLADNQDRIEKLLTFRIPYYVGPLASGKSDFAWLSRKSADKITPWNFDEIVDKESSAEAFINRMTNYDLYLPNQKVLPKHSLLYEKFTVYNELTKVKYKTEQGKTAFFDANMKQEIFDGVFKVYRKVTKDKLMDFLEKEFDEFRIVDLTGLDKENKVFNASYGTYHDLCKILDKDFLDNSKNEKILEDIVLTLTLFEDREMIRKRLENYSDLLTKEQVKKLERRHYTGWGRLSAELIHGIRNKESRKTILDYLIDDGNSNRNFMQLINDDALSFKEEIAKAQVIGETDNLNQVVSDIAGSPAIKKGILQSLKIVDELVKIMGHQPENIVVEMARENQFTNQGRRNSQQRLKGLTDSIKEFGSQILKEHPVENSQLQNDRLFLYYLQNGRDMYTGEELDIDYLSQYDIDHIIPQAFIKDNSIDNRVLTSSKENRGKSDDVPSKDVVRKMKSYWSKLLSAKLITQRKFDNLTKAERGGLTDDDKAGFIKRQLVETRQITKHVARILDERFNTETDENNKKIRQVKIVTLKSNLVSNFRKEFELYKVREINDYHHAHDAYLNAVIGKALLGVYPQLEPEFVYGDYPHFHGHKENKATAKKFFYSNIMNFFKKDDVRTDKNGEIIWKKDEHISNIKKVLSYPQVNIVKKVEEQTGGFSKESILPKGNSDKLIPRKTKKFYWDTKKYGGFDSPIVAYSILVIADIEKGKSKKLKTVKALVGVTIMEKMTFERDPVAFLERKGYRNVQEENIIKLPKYSLFKLENGRKRLLASARELQKGNEIVLPNHLGTLLYHAKNIHKVDEPKHLDYVDKHKDEFKELLDVVSNFSKKYTLAEGNLEKIKELYAQNNGEDLKELASSFINLLTFTAIGAPATFKFFDKNIDRKRYTSTTEILNATLIHQSITGLYETRIDLSKLGGD

SEQ ID NO: 731 - protein, 1345 aa, Streptococcus mutans; identical to SEQ ID NO: 730

SEQ ID NO: 732 - protein, 1350 aa, Streptococcus mutans
MKKPYSIGLDIGTNSVGWAVVTDDYKVPAKKMTVLGNTDKSHIKKNLLGALLFDSGNTAADRRLKRTARRRYTRRRNRILYLQEIFAEEMSKVDDSFFHRLEDSFLVTEDKRGERHPIFGNLEEEVKYHENFPTIYHLRQYLADNPEKVDLRLVYLALAHIIKFRGHFLIEGKFDTRNNDVQRLFQEFLAVYDNTFENSSLQEQNVQVEEILTDKISKSAKKDRVLKLFPNEKSNGRFAEFLKLIVGNQADFKKHFELEEKTPLQFSKDTYEEELEVLLAQIGDNYAELFLSAKKLYDSILLSGILTVTDVSTKAPLSASMIQRYNEHQMDLAQLKQFIRQKLSDKYNEVFSDVSKDGYAGYIDGKTNQEAFYKYLKGLLNKIEGSGYFLDKIEREDFLRKQRTFDNGSIPHQIHLQEMRAIIRRQAEFYPFLADNQDRIEKILTFRIPYYVGPLARGKSDFAWLSRKSADKITPWNFDEIVDKESSAEAFINRMTNYDLYLPNQKVLPKHSLLYEKFTVYNELTKVKYKTEQGKTAFFDANMKQEIFDGVFKVYRKVTKDKLMDFLEKEFDEFRIVDLTGLDKENKAFNASYGTYHDLRKILDKDFLDNSKNEKILEDIVLTLTLFEDREMIRKRLENYSDLLTKEQVKKLERRHYTGWGRLSAELIHGIRNKESRKTILDYLIDDGNSNRNFMQLINDDALSFKEEIAKAQVIGETDNLNQVVSDIAGSPAIKKGILQSLKIVDELVKIMGHQPENIVVEMARENQFTNQGRRNSQQRLKGLTDSIKEFGSQILKEHPVENSQLQNDRLFLYYLQNGRDMYTGEELDIDYLSQYDIDHIIPQAFIKDNSIDNRVLTSSKENRGKSDDVPSEDVVNRMRPFWNKLLSSGLISQRKYNNLTKKELTPDDKAGFIKRQLVETRQITKHVARMLDERFNKEFDDNNKRIRRVKIVTLKSNLVSSFRKEFELYKVREINDYHHAHDAYLNAVVVKALLVKYPKLEPEFVYGEYPKYNSYRERKTATQKMFFYSNIMNMFKSKVKLADDQIVERPMIEVNDETGEIAWDKTKHITTVKKVLSYPQVNIVKKVEEQTIGQNGGLFDDNPKSPLEVIPSKLVPLKKALNPEKYGGYQKPTTAYPILLIVDTKQLIPISVMDKKRFEQNPVKFLKDKGYQQIEKNNFVKLPKYTLVDIGNGIKRLWASSKEVHKGNQLVVSKKSQDLLYHAHHLDNDYSNEYVKNHYQQFDILFNEITSFSKKCKLGKEHIQKIEEAYSKERDSASIEELADGFIKLLGFTQLGATSPFSFLGIKLNQKQYTGKKDYLLPCMEATLIHQSITGLYETRIDLSKLGGD

SEQ ID NO: 733 - protein, 1350 aa, Streptococcus mutans; identical to SEQ ID NO: 732

SEQ ID NO: 734 - protein, 1345 aa, Streptococcus mutans
MKKPYSIGLDIGTNSVGWAVVTDDYKVPDKKMKVLGNTDKSHIKKNLLGALLFDSGNTAEDRRLKRTARRRYTRRRNRILYLQEIFSEEMGKVDDSFFHRLEDSFLVTEDKRGERHPIFGNLEEEVKYHENFPTIYHLRQYLADNPEKTDLRLVYLALAHIIKFRGHFLIEGKFDTRNNDVQRLFQEFLAVYDNTFENSSLQEQNVQVEEILTDKISKSAKKDRVLKLFPNEKSNGRFAEFLKLIVGNQADFKKHFELEEKAPLQFSKDIYEEELEVLLAQIGDNYAELFLSAKKLYDSILLSGILTVTDVSTKAPLSASMIQRYNEHQMDLAQLKQFIRQKLSDKYNEVFSDVSKDGYAGYIDGKTNQEAFYKYLKGLLNKIEGSGYFLDKIEREDFLRKQRTFDNGSIPHQIHLQEMRAIIRRQAEFYPFLADNQDRIEKILTFRIPYYVGPLARGKSDFAWLSRKSADKITPWNFDEIVDKESSVEAFINRMTNYDLYLPNQKVLPKHSLLYEKFTVYNELTKVKYKTEQGKTAFFDANMKQEIFDGVFKVYRKVTKDKLMDFLEKEFDEFRIVDLTGLDKENKAFNASYGTYHDLRKILDKDFLDNSKNEKILEDIVLTLTLFEDREMIRKRLKNYSDLLTKEQLKKLERRHYTGWGRLSAELIHGIRNKESRKTILDYLIDDGNSNRNFMQLINDDALSFKEEIAKAQVIGETDNLNQVVSDIAGSPAIKKGILQSLKIVDELVKIMGHQPENIVVEMARENQFTNQGRRNSQQRLKGLTDSIKEFGSQILKEHPVENSQLQNDRLFLYYLQNGRDMYTGEELDIDYLSQYDIDHIIPQAFIKDNSIDNRVLTSSKENRGKSDDVPSKDVVRKMKSYWSKLLSAKLITQRKFDNLTKAERGGLTDDDKAGFIKRQLVETRQITKHVARILDERFYTETDENNKKIRQVKIVTLKSNLVSNFRKEFELYKVREINDYHHAHDAYLNAVIGKALLGVYPQLEPEFVYGDYPHFHGHKENKATAKKFFYSNIMNFFKKDDVRTDKNGEIIWKKDEHISNIKKVLSYPQVNIVKKVEEQTGGFSKESILPKGNSDKLIPRKTKKFYWDTKKYGGFDSPIVAYSILVIADIEKGKSKKLKTVKALVGVTIMEKMTFERDPVAFLERKGYRNVQEENIIKLPKYSLFKLENGRKRLLASARELQKGNEIVLPNHLGTLLYHAKNIHKVDEPKHLDYVDKHKDEFKELLDVVSNFSKKYTLAEGNLEKIKELYAQNNGEDLKELASSFINLLTFTAIGAPATFKFFDKNIDRKRYTSTTEILNATLIHQSITGLYETRIDLSKLGGD

SEQ ID NO: 735 - protein, 1345 aa, Streptococcus mutans
MKKPYSIGLDIGTNSVGWAVVTDDYKVSAKKMKVLGNTDKSHIKKNLLGALLFDSGNTAEDRRLKRTARRRYTRRRNRILYLQEIFAEEMSKVDDSFFHRLEDSFLVTEDKRGERHPIFGNLEEEVKYHENFPTIYHLRQYLADNPEKVDLRLVYLALAHIIKFRGHFLIEGKFDTRNNDVQRLFQEFLAVYDNTFENSSLQEQNVQVEEILTDKISKSAKKDRVLKLFPNEKSNGRFAEFLKLIVGNQADFKKHFELEEKAPLQFSKDTYEEELEVLLAQIGDNYAELFLSAKKLYDSILLSGILTVTDVSTKAPLSASMIQRYNEHQMDLAQLKQFIRQKLSDKYNEVFSDVSKDGYAGYIDGKTNQEAFYKYLKGLLNKIEGSGYFLDKIEREDFLRKQRTFDNGSIPHQIHLQEMRAIIRRQAEFYPFLADNQDRIEKILTFRIPYYVGPLARGKSDFAWLSRKSADKITPWNFDEIVDKESSAEAFINRMTNYDLYLPNQKVLPKHSLLYEKFTVYNELTKVKYKTEQGKTAFFDANMKQEIFDGVFKVYRKVTKDKLMDFLEKEFDEFRIVDLTGLDKENKAFNASYGTYHDLRKILDKDFLDNSKNEKILEDIVLTLTLFEDREMIRKRLENYSDLLTKEQVKKLERRHYTGWGRLSAELIHGIRNKESRKTILDYLIDDGNSNRNFMQLINDDALSFKEEIAKAQVIGETDNLNQVVSDIAGSPAIKKGILQSLKIVDELVKIMGHQPENIVVEMARENQFTNQGRRNSQQRLKGLTDSIKEFGSQILKEHPVEHSQLQNDRLFLYYLQNGRDMYTGEELDIDYLSQYDIDHIIPQAFIKDNSIDNRVLTSSKENRGKSDDVPSKNVVRKMKSYWSKLLSAKLITQRKFDNLTKAERGGLTDDDKAGFIKRQLVETRQITKHVARILDERFHTETDENNKKIRQVKIVTLKSNLVSNFRKEFELYKVREINDYHHTHDAYLNAVIGKALLGVYPQLEPEFVYGDYPHFHGHKENKATAKKFFYSNIMNFFKKDDVRTDKNGEIIWKKDEHISNIKKVLSYPQVNIVKKVEEQTGGFSKESILPKGNSDKLIPRKTKKFYWDTKKYGGFDSPIVAYSILVIADIEKGKSKKLKTVKALVGVTIMEKMTFERDPVAFLERKGYRNVQEENIIKLPKYSLFKLENGRKRLLASARELQKGNEIVLPNHLGTLLYHAKNIHKVDEPKHLDYVDKHKDEFKELLDVVSNFSKKYTLAEGNLEKIKELYAQNNGEDLKELASSFINLLTFTAIGAPATFKFFDKNIDRKRYTSTTEILNATLIHQSITGLYETRIDLSKLGGD

SEQ ID NO: 736 - protein, 1345 aa, Streptococcus mutans; identical to SEQ ID NO: 735

SEQ ID NO: 737 - protein, 1345 aa, Streptococcus mutans
MKKPYSIGLDIGTNSVGWSVVTDDYKVPAKKMKVLGNTDKSHIEKNLLGALLFDSGNTAEDRRLKRTARRRYTRRRNRILYLQEIFSEEMGKVDDSFFHRLEDSFLVTEDKRGERHPIFGNLEEEVKYHENFPTIYHLRQYLADNPEKVDLRLVYLALAHIIKFRGHFLIEGKFDTRNNDVQRLFQEFLAVYDNTFENSSLQEQNVQVEEILTDKISKSAKKDRVLKLFPNEKSNGRFAEFLKLIVGNQADFKKHFELEEKAPLQFSKDTYEEELEVLLAQIGDNYAELFLSAKKLYDSILLSGILTVTDVGTKAPLSASMIQRYNEHQMDLAQLKQFIRQKLSDKYNEVFSDVSKDGYAGYIDGKTNQEAFYKYLKGLLNKIEGSGYFLDKIEREDFLRKQRTFDNGSIPHQIHLQEMRAIIRRQAEFYPFLADNQDRIEKLLTFRIPYYVGPLARGKSDFAWLSRKSADKITPWNFDEIVDKESSAEAFINRMTNYDLYLPNQKVLPKHSLLYEKFTVYNELTKVKYKTEQGKTAFFDANMKQEIFDGVFKVYRKVTKDKLMDFLEKEFDEFRIVDLTGLDKENKVFNASYGTYHDLCKILDKDFLDNSKNEKILEDIVLTLTLFEDREMIRKRLENYSDLLTKEQVKKLERRHYTGWGRLSAELIHGIRNKESRKTILDYLIDDGNSNRNFMQLINDDALSFKEEIAKAQVIGETDNLNQVVSDIAGSPAIKKGILQSLKIVDELVKIMGHQPENIVVEMARENQFTNQGRRNSQQRLKGLTDSIKEFGSQILKEHPVENSQLQNDRLFLYYLQNGRDMYTGEELDIDYLSQYDIDHIIPQAFIKDNSIDNRVLTSSKENRGKSDDVPSKDVVRKMKSYWSKLLSAKLITQRKFDNLTKAERGGLTDDDKAGFIKRQLVETRQITKHVARILDERFNTETDENNKKIRQVKIVTLKSNLVSNFRKEFELYKVREINDYHHAHDAYLNAVIGKALLGVYPQLEPEFVYGDYPHFHGHKENKATAKKFFYSNIMNFFKKDDVRIDKNGEIIWKKDEHISNIKKVLSYPQVNIVKKVEEQTGGFSKESILPKGNSDKLIPRKTKKFYWDTKKYGGFDSPIVAYSILVIADIEKGKSKKLKTVKALVGVTIMEKMTFERDPVAFLERKGYRNVQEENIIKLPKYSLFKLENGRKRLLASARELQKGNEIVLPNHLGTLLYHAKNIHKVDEPKHLDYVDKHKDEFKELLDVVSNFSKKYTLAEGNLEKIKELYAQNNGEDLKELASSFINLLTFTAIGAPATFKFFDKNIDRKRYTSTTEILNATLIHQSITGLYETRIDLSKLGGD

SEQ ID NO: 738 - protein, 1345 aa, Streptococcus mutans; identical to SEQ ID NO: 737

SEQ ID NO: 739 - protein, 1355 aa, Streptococcus mutans
MKKSYSIGLDIGTNSVGWAVVTDDYKVPAKKMKVLGNTDKSHIKKNLLGALLFDSGNTAEDRRLKRTARRRYTRRRNRILYLQEIFSEEMGKVDDSFFHRLDESFLTDDDKNFDSHPIFGNKAEEDAYHQKFPTIYHLRKHLADSTEKADLRLVYLALAHMIKFRGHFLIEGELNAENTDVQKLFADFVGVYDRTFDDSHLSEITVDASSILTEKISKSRRLEKLINNYPKEKKNTLFGNLIALSLGLQPNFKTNFKLSEDAKLQFSKDTYEEDLEELLGKIGDDYADLFTLAKNLYDAILLSGILTADDSSTKAPLSASMIKRYAEHHEDLEKLKEFIKANKPELYHDIFKDETKNGYAGYIENGVKQDEFYKYLKNTLSKIAGSDYFLDKIEREDFLRKQRTFDNGSIPHQIHLQEMHAILRRQGDYYPFLKENQDRIEKILTFRIPYYVGPLARKNSRFAWAEYHSDEAVMPWNFDQVIDKESSAQAFIEHMTNNDLYLPNEKVLPKHSPLYEKYTVYNELTKIKYVTEIGEAKFFDANLKQEIFDGLFKHERKVTKKKLRTFLDKNFDEFRIVDIQGLDKETETFNASYATYQDLLKVIKDKVFMDNPENAEILENIVLTLTLFEDREMIKQRLAKYADVFDKKVIDQLARRHYTGWGRLSAKLLNGIRDKQSCKTIMDYLIDDAQSNRNLMQLITDDNLTFKDDIVKAQYVDNSDDLHQVVQSLAGSPAIKKGILQSLKIVDELVKVMGKEPEQIVVEMARENQTTAKGRRNSQQRYKRLKEAIKSLDRDLNHKILKEHPTDNQALQNNRLFLYYLQNGRDMYTGESLDINRLSDYDIDHVIPQAFIKDNSIDNRVLTSSKANRGKSDDVPSEDVVNRMRPFWNKLLSSGLISQRKYNNLTKKELTPDDKAGFIKRQLVETRQITKHVARMLDERFNKEFDDNNKRIRRVKIVTLKSNLVSSFRKEFELYKVREINDYHHAHDAYLNAVVVKALLVKYPKLEPEFVYGEYPKYNSYRERKTATQKMFFYSNIMNMFKSKVKLADDQIVERPMIEVNDETGEIAWDKTKHITTVKKVLSYPQVNIVKKVEEQTIGQNGGLFDDNPKSPLEVIPSKLVPLKKALNPEKYGGYQKPTTAYPILLIVDTKQLIPISVMDKKRFEQNPVKFLKDKGYQQIEKNNFVKLPKYTLVDIGNGIKRLWASSKEVHKGNQLVVSKKSQDLLYHAHHLDNDYSNEYVKNHYQQFDILFNEITSFSKKCKLGKEHIQKIEEAYSKERDSASIEELADGFIKLLGFTQLGATSPFSFLGIKLNQKQYTGKKDYLLPCMEATLIHQSITGLYETRIDLNKLGGD

SEQ ID NO: 740 - protein, 1355 aa, Streptococcus mutans; identical to SEQ ID NO: 739

SEQ ID NO: 741 - protein, 1125 aa, Streptococcus mutans
MTNGKILGLDIGIASVGVGIINAKTGNVEHASSRIFPAANADNNVERRSARGGRRLIRRKKHRLKRVEDLFEKYNIDTDFSNLNLNPYQLRVKGLNEQLSNEELFAILKNIAKRRGISYLDDAEDDSVGSSDYAKAIDENRKLLKKQTPGEIQLKRLEKYGQLRGNFTIQDENGEYHRLINVFSTSDYVKEARRILETQSYYNKFITESFVEDYIKILQGKRKYYVGPGNEKSRTDYGIYRTDGETLDNLFGILIGKCGFYPEEYRAAKASYTAQEYNFLNDLNNLTVPTETKKLSTEQKYQLVDFAKTASTLEAAKLLKEIAKLVGCQVEEIKGYRLDNKDKPDLHTFEPFRKLKSNLTTIAVENLSITTLDTLAHILTLNTEREGIEEAIQKELPNIFSDEQITGIIAVRKKNSQIFGKGWHSFSIKLMKELIPELYETSEEQMTILIRLKKVKTNSKITNRTKYINEQEVTDEIYNPVVSKSIRQTVKIINAAIKKYGAFDQIVIEMPRESNEEDERKFIADLQKSNAKEKDDAMKQAALLYNGKAELPHGVFHGHKELATKIRLWYQQGERCLYSGKHIDIHDLIHNQHMFEIDHVLPLSLSFDDSLANKVLVYSWANQEKGQRTPFQALPQMASAWSFRELRDYISKQKGISKKKRDYLLTEQDINKVEVKQKFIERNLVDTRYVSRVVLNTLQDALKVMNKETKISVIRGQFTSQLRRQWRIDKSRETYHHHAVDALIIAASSQLRLWKKQNNPMFAEDKHGQKINLDTGEVLSDDAYKELVYQAPYQGFVNTISSKSFEDEILFSYQVDSKVNRKISDATIYATRQAQLGKDKKEETYVLGKIKDIYSQAGYDAFRKKYDKDKAVFLMYQKDPETWEKVIEVILRDYKELDDKGKEIGNPFERYKVKHGFVRKYSRKNKGTEIKSLKYYDNKLGNHIDITPNNSKHSVVLQSINPWRADLYFNPETTKYELMGLKYADLSFEKGTGKYSISREKYDEIKEREGISSKSEFKFTLYKNDLILVKDIGNHKELIARFNSKNDTSKHYVELKPWNKAKFDSEEELIPAFGKVAKSGQFIKGLNKPDLSIYKVKTDILGHKYYIKKEGDKPKLNFENKIKNK

SEQ ID NO: 742 - protein, 1125 aa, Streptococcus mutans
MTNGKILGLDIGIASVGVGIINAKTGNVEHASSRIFPAANADNNVERRSARGGRRLIRRKKHRLKRVEDLFEKYNIDTDFSNLNLNPYQLRVKGLNEQLSNEELFAILKNIAKRRGISYLDDAEDDSVGSSDYAKAIDENRKLLKKQTPGEIQLKRLEKYGQLRGNFTIQDENGEYHRLINVFSTSDYVKEARRILETQSYYNKFITESFVEDYIKILQGKRKYYVGPGNEKSRTDYGIYRTDGETLDNLFGILIGKCGFYPEEYRAAKASYTAQEYNFLNDLNNLTVPTETKKLSTEQKYQLVDFAKTASTLGAAKLLKEIAKLVGCQVEEIKGYRLDNKDKPDLHTFEPFRKLKSNLTTIAVENLSITTLDTLAHILTLNTEREGIEEAIQKELPNIFSDEQITEIIAVRKKNSQIFGKGWHSFSIKLMKELIPELYETSEEQMTILTRLKKVKTNSKITNRTKYINEEEITDEIYNPVVSKSIRQTVKIINATIKKYGAFDQIIIEMPRESNEEDERKFIADLQKSNAKEKDDAMKQAALLYNGKDELPHDVFHGHKELATKIRLWYQQGERCLYSGKHIDIHDLIHNQHMFEIDHVLPLSLSFDDSLANKVLVYSWANQEKGQRTPFQALPQMASAWSFRELRDYISKQKGISKKKRDYLLTEQDINKVEVKQKFIERNLVDTRYVSRVVLNTLQDALKVMNKETKISVIRGQFTSQLRRQWRIDKSRETYHHHAVDALIIAASSQLRLWKKQNNPMFAEDKHGQKINLDTGEVLSDDAYKELVYQAPYQGFVNTISSKSFEDEILFSYQVDSKVNRKISDATIYATRQAQLGKDKKEETYVLGKIKDIYSQAGYDAFRKKYDKDKAVFLMYQKDPETWEKVIEVILRDYKELDDKGKEIGNPFERYKVKHGFVRKYSRKNKGTEIKSLKYYDNKLGNHIDITPNNSKHSVVLQSINPWRADLYFNPETTKYELMGLKYADLSFEKGTGKYSISREKYDEIKEREGISSKSEFKFTLYKNDLILVKDIGNHKELIARFNSKNDTSKHYVELKPWNKAKFDSEEELIPAFGKVAKSGQFIKGLNKPDLSIYKVKTDILGHKYYIKKEGDKPKLNFENKIKNK

SEQ ID NO: 743 - protein, 1125 aa, Streptococcus mutans; identical to SEQ ID NO: 742

SEQ ID NO: 744 - protein, 1125 aa, Streptococcus mutans; identical to SEQ ID NO: 741

SEQ ID NO: 745 - protein, 670 aa, Streptococcus oralis
MAKFNKNYSIGLDIGVSSVGYAVVTEDYRVPAFKFKVLGNTEKEKIKKNLIGSTTFVPAQSAQGTRVFRVNRRRIDRRNHRIAYLRDIFQKEIGKIDKNFYRRLDESFRVLGDKSEDIQIKQPFFGNKELETAYHKKYPTIYHLRKHLADADKNSPVADIREVYMALSHIFKYRGHFLTLGKIDPNNINMQNSWIDFIESCQDAFDLEISDESKTIAAIFKSSDNRQEKVKGILSYFQPELAKKDKSIFKQLLQLLFGLKTKFKECFELEEEPDLNFSKENYDENLENLLGTLEEDFPDVFAKLKILRDTILLSDMLTYTGATHARFSATMVERYEEHRKDLQRFKSFVKQNLSEQDYLDIFGRKTPNGFDVDKETKGYVGYISNKMVLTNKQKTIQQNFYDYISGKITGIEGAEYFLNKISDGTFLRKLRTTDNGTIPNQIHAYELEKIIERQGRDYPFLLENKDKLLSILTFKIPYYVGPLAKGNNSRFAWIKRTTSQDVLDNNDEDTKNGKIRPWNYHKLINMDETRDAFITNLIGNDIILLNEKVLPKRSLIYEEVMLQNELTRIKYKDKYGKIHFFDSELRQEIINNLFKTNSKRVSSAMLLAYLENFTNLQAVEIVSGIEKGKSLNSTLKTYNDLKTIFSEDLLDSEIYQKELEEIIKVITVFV

SEQ ID NO: 746 - protein, 1373 aa, Streptococcus oralis
MENKNYSIGLDIGTNSVGWAVITDDYKVPSKKMKVLGNTDKRFIKKNLIGALLFDEGTTAEARRLKRTARRRYTRRKNRLRYLQEIFAEEMSKVDSSFFHRLDDSFLIPEDKKGSKYPIFATLIEEKEYHKQFPTIYHLRKQLADSKEKTDLRLIYLALAHMIKYRGHFLYEDTFDIKNNDIQKIFNEFISIYNNTFEGNSLSGQNVQVEAIFTDKISKSAKRERVLKLFPDEKSTGLFSEFLKLIVGNQADFKKHFDLEEKAPLQFSRDTYDEDLENLLGQIGDDFADLFVAAKKLYDAILLSGILTVTDPSTKAPLSASMIERYENHQKDLATLKQFIKTNLPEKYDEVFSDQSKDGYAGYIDGKTTQESFYKYIKNLLSKFEGADYFLEKIEREDFLRKQRTFDNGSIPHQIHLQEMNAILRRQGEHYPFLKENKEKIEKILTFRIPYYVGPLARGNRDFAWLTRNSDQAIRPWNFEEIVDKASSAESFINKMTNYDLYLPEEKVLPKHSLLYETFAVYNELTKVKFIAEGLRDYQFLDSRQKKDIFYTLFKAEDKRKVTEKDIIQYLHTVDGYDGIELKGIEKQFNASLSTYHDLLKIIKDKEFMDDPNNEEILENIVHTLTIFEDREMIKQRLAQYDSLFDEKVIKALTRRHYTGWGKLSSKLINGIRDKQTGKTILDYLMDDGYNNRNFMQLINDDELSFKEIIKKAQVVGKTDDVKQVVQELPGSPAIKKGILQSIKLVDELVKVMGHEPESIVIEMARENQTTARGKKNSQQRYKRIEDSLKILASGLNAKILKEHPTDNIQLQNDRLFLYYLQNGRDMYTGKPLDINQLSSYDIDHIVPQAFIKDDSLDNRVLTSLKDNRGKSDNVPSLEVVEKMKTFWQQLLDSKLISYRKFNNLTKAERGGLDERDKVGFIKRQLVETRQITKHVAQILDARYNTEVNEKDKKNRTVKIITLKSNLVSNFRKEFRLYKIREINDYHHAHDAYLNAVVAKAILKKYPKLEPEFVYGDYQKYDLKRYISRSKDPKEIEKATEKYFFYSNLLNFFKEEVHYADGTIVKRENIEYSKDTGEIAWNKEKDFATIKKVLSLPQVNIVKKREVQTGGFSKESILPKGNSDKLIPRKTKDILWDTTKYGGFDSPVIAYSILLIADIEKGKAKRLKTVKTLVGITIMEKATFEKSPIAFLENKGYHNVRKENILCLPKYSLFELKNGRRRMLASAKELQKGNEIVLPVHLTTLLYHAKNIHRLDEPEHLEYIQKHRNEFKGLLNLVSEFSQKYVLADANLEKIKNLYADNEQADIEILANSFINLLTFTALGAPAAFKFFGKDVDRKRYTTVSEILNATLIHQSITGLYETRIDLSKLGED

SEQ ID NO: 747 - protein, 1371 aa, Streptococcus oralis
MENKNYSIGLDIGTNSVGWSVITDDYKVPSKKMKVLGNTDKRFIKKNLIGALLFDEGTTAEARRLKRTARRRYTRRKNRLRYLQEIFAEEMSKVDSSFFHRLDDSFLIPEDKRGSKYPIFATLAEEKEYHKQFPTIYHLRKQLADSKEKTDLRLIYLALAHMIKYRGHFLYEDTFDIKNNDIQKIFSEFISIYDNTFEGSSLSGQNAQVEAIFTDKISKSAKRERVLKLFPDEKSTGLFSEFLKLIVGNQADFKKHFDLGEKAPLQFSKDTYDEDLENLLGQIGDDFADLFLVAKKLYDAILLSGILTVTDPSTKAPLSASMIERYENHQKDLAVLKQFIKNNLPEKYDEVFSDQSKDGYAGYIDGKTTQEAFYKYIKNLLSKFEGTDYFLEKIEREDFLRKQRTFDNGSIPHQIHLQEMNAILRRQGEHYPFLKDNKEKIEKILTFRIPYYVGPLARGNRDFAWLTRNSDEAIRPWNFEEIVDKASSAEDFINKMTNYDLYLPEEKVLPKHSLLYETFAVYNELTKVKFIAEGLRDYQFLDSGQKKQIVTQLFKEKRKVTEKDIIQFLHNVDGYDGIELKGIEKQFNASLSTYHDLLKIIKDKEFMDDSKNEEILENIVHTLTIFEDREMIKQRLAQYDSLFDEKVIKALIRRHYTGWGKLSAKLIDGICDKQTGNTILDYLIDDGKNNRNFMQLINDDGLSFKEITQKAQVVGKTDDVKQVVQELPGSPAIKKGILQSIKIVDELVKVMGHTPESIVIEMARENQTTARGKKNSQQRYKRIEDALKNLASGLDSNILKEHPTNNIQLQNDRLFLYYLQNGRDMYTGKPLDINQLSSYDIDHIVPQAFIKDDSLDNRVLTSLKDNRGKSDNVPSIEVVQKRKAFWQQLLDSKLISERKFNNLTKAERGGLDERDKVGFIKRQLVETRQITKHVAQILDARFNKEVNEKDKKNRTVKIITLKSNLVSNFRKEFRLYKVREINDYHHAHDAYLNAVVAKAILKKYPKLEPEFVYGDYQKYDLKRYISRSRNPKEVEKATEKYFFYSNLLNFFKEEVHYADGTIVKRENIEYSKDTGEIAWNKEKDFATIKKVLSYPQVNIVKKREVQTGGFSKESILPKGNSDKLIPRKTKDILWETTKYGGFDSPVIAYSILLIADIEKGKAKKLKTVKTLVGITIMEKAAFEENPITFLENKGYHNVRKENILCLPKYSLFELENGRRRLLASAKELQKGNEIVLPVYLTTLLYHSKNVHKLDEPEHLEYIQKHRNEFKDLLNLVSEFSQKYVLADANLEKIQNLYADNEQADIEILANSFINLLTFTALGAPAAFKFFGKDIDRKRYTTVSEILNATLIHQSITGLYETRIDLSKLGED

SEQ ID NO: 748 - protein, 1121 aa, Streptococcus oralis
MNGLVLGLDIGIASVGVGILEKNSGKIIHANSRLFPAATADNNVERRKNRQARRLNRRKKHRGVRFQDLFEDYGLLTDFSKVSINLNPYRLRVDGLNQQLTNEELFIALKNIVKRRGISYLDDASEDGGAVSSDYGKAVEENRKLLAEQTPGQIQLERFEKYGQVRGDFTVVENGEKCRLINVFSTSAYRKEAEKILRKQQEFNNQITDEFIEDYLKILTGKRKYYHGPGNEKSRTDYGRFRTDGTTLDNIFGVLIGKCTFYPNEYRASKSSYTAQEFNLLNDLNNLTVPTETKKLSEEQKKVIVEYAKEAKTLGASTLLKYIVKMIDASVDQISGYRVDVNNKPEMHTFEVYRKMQSLETISVGELSRNVLDELAHILTLNTEREGIEEAINSKLMGVFSQDQVLELVQFRKNNSSLFSKGWHNFSLKLMMELIPELYETSEEQMTILTRLGKQKSKETSKRTKYIDEKELTEEIYNPVVAKSVRQAIKIINEATKKHGIFDNIVIEMARENNEEDAKKDYIKRQKANQDEKNAAMEKAAFQYNGKKELPGNIFNGHKELATKIRLWHQQGEKCLYTGKTIPISDLIHNQYKYEIDHILPLSLSFDDSLSNKVLVHATANQEKGQRTPFQALDSMDDAWSYREFKSYVKDLKSLSNKKKDYLLTEEDISKIEVKQKFIERNLVDTRYSSRVVLNALQDFYKSHQFDTTISVVRGQFTSQLRRKWGLEKSRETYHHHAVDALIIAASSQLRLWKKQNNPLITYKEGQFVDSQTGEIISLTDDEYKELVFKAPYDHFVDTLHSKTFEDGILFSYQVDSKYNRKISDATIYATRKAKLDKDKSEETYVLGKIKDIYSQAGYDAFIKIYNKDKRKFLMYHKDPQTFEKVIEEILRTYPSKERNDKNKEVPCNPFEKYRQENGPIRKYSKKGNGPEIKCLKYYDNKLGNYIDISPDGSDNQVVLQSLKPWRTDVYFNHQTKEYELMGLKYSDLSFEKGSGKYSISNEKYNSIKRIEGVNEQSEFKFTLYKNDLILIKDSENNEQKLFRFNSRNDTAKHYVELKPYDKARFDGQQELITILGNVAKGGQCLKGLNKSNISIFKVKTDVLGKKHIIKKEGDEPKLKF

SEQ ID NO: 749 - protein, 1134 aa, Streptococcus oralis
MNGLVLGLDIGIASVGVGILEKNSGKIVHASSRIFPAATADNNVERRKNRQARRLHRRKKHRGARLKDLFEYYGLLTDFSKVSINLNPYRLRVDGLDQQLTNEELFIALKNIVKRRGISYLDDASEDGGTVSSDYGKAVEENRKLLAEQTPGQIQLERFEKYGQLRGDFTVVENSEKCRLINVFSTSAYKKEAERILRKQQEFNNQITDEFIEDYLKILTGKRKYYHGPGNEKSRTDYGRFRTDGATLDNIFGILIGKCTFYPNEYRASKASYTAQEFNLLNDLNNLTVPTETKKLSEEQKKTIIEYAKSAKTLGASTLLKYIAKMIDASVDQIRGYRVDVNNKPEMHTFEVYRKMQSLETISVGELSRNILDELAHILTLNTEREGIEEAINTKLRDSFSQDQVLELVQFRKNNSSLFSKGWHNFSLKLMMELIPELYETSEEQMTILTRLGKQKSKETSKRTKYIDEKEVTEEIYNPVVAKSVRQAIKIINEATKKHGIFDNIVIEMARENNEEDAKKDYIKRQKANQDEKYAAMEKAAFQYNGKKELPDNIFHGHKELATKIRLWHQQGEKCLYTGKSIPISDLIHNQYKYEIDHILPLSLSFDDSLSNKVLVLATANQEKGQRTPFQALDSMDDAWSYREFKSYVKESKLLGNKKKEYLLTEEDISKIEVKQKFIERNLVDTRYSSRVVLNALQDFYKNHNFDTTISVVRGQFTSQLRRKWGLEKSRETYHHHAVDALIIAASSQLRLWKKQNNPLIAYKEGQFVDSQTGEIISLTDDEYKELVFKAPYDHFVDTLSSKTFEDSILFSYQVDSKFNRKISDATIYATRKAKLDKEKKEYTYTLGKIKDIYSLGTKTPSKTGFYKFLDLYNKDKSQFLMFQKDRKTWDEVIEKIMEQYRPFKEYDKAGKLVDFNPFEKYRQENGPIRKYSKKGNGPEIKSLKYYDILLGKHKNITPEGSRNTVALLSLNPWRTDVYYNMETKKYEFLGLKYADLPFEEGGAYGISTETYNELREKEGIGKNSEFKFTLYKNDLILIKDTETNCQQFFRFWSRTGKDNPKSFEKHKIELKPYEKAKFEKGEELEVLGKVPPSSNQFQKNMQIENLSIYKVKTDVLGNKHFIKKEGDKPKLKF

SEQ ID NO: 750 - protein, 550 aa, Streptococcus oralis
MYSLDKNGSPTPLYRDQLNQYEVDHIIPYSFLPIDSIDNKVLTHRENNQRKLDNIPDKETVANMKPFWEKLYNAKLISQTKYQRLTTSERTPDGVLTESMKAGFIERQLVETRQIIKHVARILDNRFSDTKIITLKSQLVTNFRNTFHIAKIRELNDYHHAHDAYLAVVVGQTLLKAYPKLAPELIYGHHAHFNRHEENKATIRKYLYSNIMRFFNNPDSKVSKDIWDCNRDLPIIKDIIYNSQVNFVKRTMIKKGAFYNQNPVGKFNKQIAANNRYPLKTKVSSLDTSIYGGYGPMNSALSIIIIAERFNEKKCKIETVKEFHDIFIIDYKKFNNDPFQFLNDTSENGFLKKNNINRVLAFYRVPKYSLMQKIDGTRMLFESKSNLHKATQFKLTKTQNELFFHMRRLLTKSNLMDLKSESAIKESQNFILKHKEEFDNISNQLSAFSQKMLGDTTSLKNLIKGYNERKIKEINSSEETIKYFYDNFIKMFSFVKSGAPKDINDFFNNKYTVARMRPKPDKKLLNATLIHQSITGLYETRIDLSKLGED

SEQ ID NO: 751 - protein, 1140 aa, Streptococcus parasanguinis
MNGLVLGLDIGIASVGVGILKKDIGEIIHTNSRLFSAATADSNIERRGHRGGKRLTRRKKHRSIRLHDLFEDFGLLTDFSKVSINLNPYQLRVQGLDNQLTNEELFIALKNIVKRRGISYLDDASEDGGTVSSDYGKAVEENRKLLAEQTPGQIQLDRFEKYGQVRGDFNVVENGEKRRLINVFTTSAYSKEAERILRKQQEFNKKITDEFIEDYLTILTGKRKYYHGPGNEKSRTDYGRYTTKKDPEGKYITLDNIFGILIGKCTFYPDEYRASKASYTAQEFNLLNDLNNLTVPTETKKLSEEQKKTIIKYAKTAKTLGASTLLKYIAKLIGASVDQIHGYRIDPNKKPEMHTFETYRKMQSLETISVEELPRKVLDELAHILTLNTEREGIEEAINATLKDTFSQDQVLELVQFRKNNSSLFSKGWHSFSLKLMMELIPELYETSEEQMTILTRLGKQKSKETSKRTKYIDEKELTEEIYNPVVAKSVRQAIKIINEATKKYGIFDNIVIEMARENNEEDAKKEYIKRQKANLDEKNAAMEKAAFQYNGKKELPDNVFHGHKELATKIRLWHQQGEKCLYTGKNIPISDLIQNQYKYEIDHILPLSLSFDDSLSNKVLVLATANQEKGQRTPFQALDSMDDAWSYREFKSYVKDSKLLGNKKKEYLLTEEDISKIEVKQKFIERNLVDTRYSSRVVLNALQDFYKEHQFDTTISVVRGQFTSQLRRKWGLEKSRETYHHHAVDALIIAASSQLRLWKKQNNPLISYTEGQFVDQVTGEIISLSDDEYKELVFKAPYDHFVDTLKSKKFEDSILFSYQVDSKYNRKISDATIYATRKAKLDKENKEYTYTLGKIKDIYALGTKSPSKTGFYKFLDLYNKDKSQFLMFQKDRKTWDEVIEKIIEQYRPFKEYDENGKEVDFNPFEKYRIENGPIRKYSKKGNGPEIKSLKYYDNLLGKFVDITPSESKNPVALLSLNPWRTDVYYNTETSKYEFLGLKYADLCFEKGGAYGISEVKYNKIREKEGIGKESEFKFTLYKNDLILIKDTETNCQQIFRFWSRTGKDNPKSFEKHKIELKPYEKARFEKGEELEVLGKVPPSSNQLQKNMQIENLSIYKVKTDVLGNKHFIKKEGEEPKLKF

SEQ ID NO: 752 - protein, 1374 aa, Streptococcus pseudoporcinus
MKKRYSYSIGLDIGTNSVGWAVINEDYKVPAKKMTVFGNTDRKTIKKNLLGTVLFDSGETAQARRLKRTNRRRYTRRRYRLCQLQNIFATEMVKVDDTFFQRLSESFFYYQDKAFDKHPIFGNSKEERAYHKTYPTIYHLRKDLADRDQKADLRLIYLALSHIIKFRGHFLIEGKLNSENTDVQKLFIALVTVYNLLFEEEPIAGETCDAKALLTAKTSKSKRLESLISEFPGQKKNGLFGNLLALALGLRPNFKSNFGLSEDAKLQITKDTYEEELDNLLAEIGDHYADLFLAAKNLSDAILLSDILTLSDENTRAPLSASMIKRYEEHQEDLALLKKLVKEQMPEKYWEIFSNAKKNGYAGYIEGKVSQEDFYRYIKPILSRLKGGDEFLAKIDRDDFLRKQRTFDNGSIPHQIHLKELHAILRRQEKYYPFLAEQKEKIEQLLCFRIPYYVGPLAKGGNSSFAWLKRRSDEPITPWNFKDVVDEEASAQAFIEGMTNYDTYLPEEKVLPKHSPLYEMFTVYNELTKVKYIAENMTKPLYLSAEQKEAIIDHLFKQTRKVTVKDLKEKYFSQIEGLENVDVTGVEGAFNASLGTYNDLLKIIKDKAFLDDEANAEILEEIVLILTLFQDEKLIEKRLAKYANLFEKSVLKKLRKRHYRGWGRLSRQLIDGMKDKASGKTILDFLKADDFANRNFIQLINDSSLDFEKLIDDAQKKAIKRESLTEAVANLAGSPAIKKGILQSLKVVDEIVKVMGHNPDNIVIEMSRENQTTAQGLKNARQRLKKIKEVHKKTGSRILEDNSERITNLTLQDNRLYLYLLQDGKDMYTGQDLDINNLSQYDIDHIIPQSFIKDNSIDNLVLTTQKANRGKSDNVPSIEVVRDMKDRVWRRQLANGAISRQKFDHLTKAERGGLADSDKARFLRRQLVETRQITKHVAQLLDSRFNSKSNQNKKLARNVKIITLKSKIVSDFRKDFGLYKLREVNNYHHAHDAYLNAVVGTALLKKYPKLEAEFVYGDYKHFDLVKLISKSDPSLGKATAKVFFYSNIMNFFKEELSLADGTLMKRPVIETNTETGEVVWDKVKDFKTIRKVLSYPQVNIVKKTEIQSGAFSKESVLSKGNSDKLIERKKGWDPKKYGGFDSPNTAYSIFVVAKVAKRKAQKLKTVKEIVGITIMEQAEYEKDNIAFLEKKGYQDIQEKLLIKLPKYSLFELENGRRRLLASANEFQKGNELALSGKYMKFLYLASRYDKLSSKIESEQQKKLFVEQHLHYFDEILDIVVKHATCYIKAENNLKKIISLYKKKEAYSINEQALNMLNLFIFTSLGAPSTFVFFDETIDRKRYTTSSDVLNGILIQQSITGLYETRIDLSRFGGD

SEQ ID NO: 753 - protein, 1052 aa, Streptococcus pyogenes
LSASMIKRYDEHHQDLTLLKALVRQQLPEKYKEIFFDQSKNGYAGYIDGGASQEEFYKFIKPILEKMDGTEELLAKLNREDLLRKQRTFDNGSIPHQIHLGELHAILRRQEDFYPFLKDNREKIEKILTFRIPYYVGPLARGNSRFAWMTRKSEETITPWNFEEVVDKGASAQSFIERMTNFDKNLPNEKVLPKHSLLYEYFTVYNELTKVKYVTEGMRKPAFLSGEQKKAIVDLLFKTNRKVTVKQLKEDYFKKIECFDSVEISGVEDRFNASLGTYHDLLKIIKDKDFLDNEENEDILEDIVLTLTLFEDREMIEERLKTYAHLFDDKVMKQLKRRRYTGWGRLSRKLINGIRDKQSGKTILDFLKSDGFANRNFMQLIHDDSLTFKEDLQKAQVSGQGDSLHEHIANLAGSPAIKKGILQTVKVVDELVKVMGRHKPENIVIEMARENQTTQKGQKNSRERMKRIEEGIKELGSDILKEYPVENTQLQNEKLYLYYLQNGRDMYVDQELDINRLSDYDVDHIVPQSFLKDDSIDNKVLTRSDKNRGKSDNVPSEEVVKKMKNYWKQLLNAKLITQRKFDNLTKAERGGLSELDKAGFIKRQLVETRQITKHVAQILDSRMNTKYDENDKLIREVRVITLKSKLVSDFRKDFQFYKVREINNYHHAHDAYLNAVVGTALIKKYPKLESEFVYGDYKVYDIRKMIAKSEQEIGKATAKYFFYSNIMNFFKTEITLANGEIRKRPLIETNGETGEIVWDKGRDFATVRKVLSMPQVNIVKKTEVQTGGFSKESILPKRNSDKLIARKKDWDPKKYGGFDSPTVAYSVLVVAKVEKGKSKKLKSVKELVGITIMERSSFEKDPVDFLEAKGYKEVRKDLIIKLPKYSLFELENGRKRMLASAGELQKGNELALPSKYVNFLYLASHYEKLKGSPEDNEQKQLFVEQHKHYLDEIIEQISEFSKRVILADANLDKVLSAYNKHRDKPIREQAENIIHLFTLTNLGAPAAFKCFDTTIGRNRYKSIKEVLDATLIHQSITGLYETRIDLSQLGGD

SEQ ID NO: 754 - protein, 1368 aa, Streptococcus pyogenes; identical to SEQ ID NO: 42

SEQ ID NO: 755 - protein, 1367 aa, Streptococcus pyogenes; identical to SEQ ID NO: 246

SEQ ID NO: 756 - protein, 1368 aa, Streptococcus pyogenes [sequence omitted]

SEQ ID NO: 757 - protein, 1370 aa, Streptococcus ratti
MKKPYSIGLDIGTNSVGWAVITDDYKVPAKKMKVLGNTDKNYIKKNLLGALLFDSGNTAEDRRLKRTARRRYTRRRNRLLYLQDIFSDEMNKVDESFFHRLEDSFLVSEDKRGDHHPIFGNVVDEVKYHEQFPTIYHLRKYLADTPEKADLRLVYLALAHMIKFRGHFLIDDPKLDVKNTDSQELFSQFLTAYDVTQEDSHLADVKINISDIITEKMNKSRKVEALLFHFPSQKKNSFFGNLVSLVFGLLPNFKTNFNLAEDAKLQLSKDSYDEDLENLLGQIGDEYTDVFVAARKLYDSILLSGILTVNDLSTKAILSASMVRRYEEHNKDLAKLKAFVKANFTHDVFKEVFSDASKNGYAGYIEGKTSQEDFYKYVKNLIGKVDGSADFIEKIDREDFLRKQRTFDNGSIPHQVHLAEMKAILRRQGEYYPFLKEHAEKIQQILTFRIPYYVGPLDRHGHSDFAWASFNSEEKVTPWNFEEIIDKNKSAQAFIERMTNQDLYLPNEKVLPKHSPLYEKYTVYNELTKIKYVTETGTAKFFDANLKQEIFDGLFKKERKVTKRKLLTFLEKNFDEFRIVDIQGLDKETETFNASYGIYQDLLKIIKDKAFMDDSENADILEDIVLTLTLFEDREMIKQRLAKYADLFDKKVIDNLARRRYTGWGRLSAKLLNGIRDKRSRKTIMDYLVDDGRSNRNLMQLITDDNLTFKDEIAKAQYSDNSDDLHQVVQDLAGSPAIKKGILQSVKIVDELVKVMGYEPEQIVVEMARENQTTAKGRRNSQQRYKRLEEAIKNLDRDLNYKILKEHPTDNQALQNDRLFLYYLQNGRDMYTGESLDINRLSDYDIDHIIPQAFIKDNSIDNRVLVSSAKNRGKSDDVPSEDVVNRMRPFWNKLLNCGLISQRKYSNLTKKELTPNDKAGFIKRQLVETRQITKHVARILDEHFNKEFDEDKKRIRKVKVVTLKSNLVSNFRKEFELYKVREINDYHHAHDAYLNAVVAKALLMKYPKLEPEFVYGEYPKYNSYRERKTATQRMFFYSNIMNMFKSKVKLADERIIERPMIEVNDETGEIAWDKTKHIATVKKVLSYPQINIVKKVEEQTGGLTNETIYPRGSFDKLLNRKNTLEASKYGGFGSPTVAYCVLVVADSKNENGKVKKLKLGSELLGITILEKNDFENNSLDFLSRKGYQGVQEKKIIKLPKYSLFEFQDGSRRMLSSVMANDNKRGDLQKANEMILPAYLVKLLYHAKHINSVGEPAHKNYINEHCSEFQDLLNYIRQFADKFVDVDKNLSKIRSLSKSMAEYSVSEICSSFVNLLTLTALGAPADFKFFGTTIPRKRYGSPQSILSATLIHQSITGLYETRIDLSKLGED

SEQ ID NO: 758 - protein, 1135 aa, Streptococcus salivarius
MSDLVLGLDIGIGSVGVGILNKVTGEIIHKNSRIFPAAQAENNLERRTNRQGRRLTRRKKHRRVRLNHLFEESGLITDFTKVSINLNPYQLRVKGLTAELSNEELFIALKNMVKHRGISYLDDASDDGNSSVGDYAQIVKENSKQLETKTPGQIQLERYQKYGQLRGDFTVEEDGRKHRLINVFPTSAYHAEALRILQTQQEFNPQITDEFINSYLEILTGKRKYYHGPGNEKSRTDYGKYTTKKDAQGQYITLNNIFGILIGKCTFYPEEYRAAKASYTAQEFNLLNDLNNLTVPTETKKLSEEQKYQIITYVKNEKAMGPAKLFKYIAKLLACDIADIKGYRIDKSDKAEIHTFEAYRKMKTLETIDIEQIEREKLDKLAYVLTLNTEREGIQEALDHEFADGTFSQEQVDELVQFRKANSSIFGKGWHSFSVKLMMELIPELYATSEEQMTILTRLGKQKTTSSSNKTKYIDEKQLTEEIYNPVVAKSVRQAIKIVNAAIKKYGDFDNIVIEMARETNEDDEKKAIQKIQKANKAEKDAAMRKAANQYNGKAELPHSVFHGHKQLATKIRLWHQQGERCLYTGKTISIHDLINNPNQFEIDHILPLSITFDDSLANKVLVYATANQEKGQRTPYQALDSMDDAWSFRELKAFVRESKALSNKKKEYLLTEEDISKFDVRKKFIERNLVDTRYASRVVLNALQEHFKAHKIDTKVSVVRGQFTSQLRRHWGIDKTRDTYHHHAVDALIIAASSQLNLWKKQKNTLVSYSEDQLLDIETGELISDDEYKESVFKAPYQHFVDTLKSKEFEDSILFSYQVDSKFNRKISDATIYATRQAKVGKDKKDETYVLGKIKDIYALGTKTPSKTGFYKFLDLYNKDKSQFLVYQKDRKTWDEVIEKIMEQYRPFKESDKNGKEVDFNPFEKYRIENGPIRKYSRKGNGPEIKSLKYYASKLGNHIDITPKDSNNKVVLQSVSPWRADVYFNKTTGSYEILGLKYADLQFEKGTGTYRISEEKYNDIKKKEGVDSDSEFKFTLYKNDLLLIKDTETKEQRLFRFLSRSMPNKKHYVELKPYSKDKFEKNESLIEILGSADKSGRCIKGLAKSNLSIFKVRTDVLGNQHIIKNEGDKPKLDF

SEQ ID NO: 759 - protein, 1127 aa, Streptococcus salivarius
MSDLVLGLDIGIGSVGVGILNKVTGEIIHKNSRIFPAAQAENNVERRINRQGRRLTRRKKHRRVRLNHLFEESGLITDFTNVSINLNPYQLRVKGLTDELSNEELFIALKNMVKHRGISYLDDASDDGNSSVGDYAQIVKENSKQLETKTPGQIQLERYQKYGQLRGDFTVEEDGKKHRLINVFPTSAYRAEALRILQTQQEFNPQITDEFINSYLQILTGKRKYYHGPGNEKSRTDYGRYTTKKDSEDEYITLDNIFGILIGKCTFYPEEYRAAKASYTAQEFNLLNDLNNLTVPTETKKLSEEQKNQIITNVKNEKAMGPAKLFKYIAKLLSCDVADIKGYRIDKSDKAEIHTFEAYRKMKTLATIDIEQMERENLDKLAYVLTLNTEKEGIQEALEHEFADGTFSQEQIDELVQFRKANSSIFGKGWHSFSVKLMMELIPELYATSEEQMTILTRLGKQKTTSSSNKTKYIDEKQLTEEIYNPVAAKSVRQAIKIVNAAIKEYGDFDNIVIEMARETNEDDEKKAIQKIQKANKDEKDAAMLKAANQYNGKAELPHSVFHGHKQLATKIRLWHQQGERCLYTGKTISIHDLINNSNQFEIDHILPLSITFDDSLANKVLVYATANQEKGQRTPYQALDSMDDAWSFRELKAFVRDSKALSNKKKEYLLTEEDISKFDVRKKFIERNLVDTRYASRVVLNALQEHFRVHKTDTKVSVVRGQFTSQLRRHWGIEKTRDTYHHHAVDALIIAASSQLNLWKKQKNTLVSYSEDQLLDIETGELISDDEYKESVFKAPYQHFVDTLKSKEFEDSILFSYQVDSKFNRKISDATIYATRQAKVGKDKKDETYVLGKIKDIYSQTGYDAFIKIYKKDKSKFLMYRHDPQTFEKVIEPILENYPNKELNEKGKEVPCNPFLKYKEDHGYIRKYSKKGNGPEIKSLKYYDSKLGNHIDITPKNSNNKVVLQSVSPWRADVYFNKTTGKYEILGLKYADLKFEKGTGTYKISEEKYNDIKIKEGVDSDSEFKFTLYKNDLLLIKDTETKEQQLFRFLSRTMPNVKHYVELKPYDKQKFDDNEELIKILGIVAKGGQCKKGVSKPNISIYKIRTDVLGNQHIIKNEGDKPKLDF

SEQ ID NO: 760 - protein, 1385 aa, Streptococcus salivarius
MTKPYSIGLDIGTNSVGWAVITDDYKVPSKKMKVLGNTSKKYIKKNLLGALLFDSGITAEGRRLKRTARRRYTRRRNRILYLQEIFSTEMATLDDAFFQRLDDSFLVPDDKRDSKYPIFGNLVEEKVYHDEFPTIYHLRKHLADSSKKADLRLVYLALAHMIKYRGHFLIEGDFNSKNNDLQKNFQDFLDTYNAIFESDLSLENSKQLEEIVKDKISKSAKKDRILKLFPGEKNSGIFSEFLKLIVGNQADFRKYFNLDEKTSLQFSKESYDEDLETLLGHIGDDYSDVFLKAKKLYDAILLSGILTVTDNGTEAPLSSAMIMRYKEHEEDLALLKAYIRNISLETYNEVFKDNTKNGYAGYIDGKTSQEDFYVYLKRLLAGLEGADYFLEKIDREDFLRKQRTFDNGSIPYQIYLQEMRAILDKQAKFYPFLAKNKERIEKILTFRIPYYVGPLARGNSDFAWSIRKRNEKITPWNFEDVIDKESSAEAFINRMTSFDLYLPEEKVLPKHSLLYENFTVYNELTKVRFIAEGMRDYQFLDSKQKKDIVRLYFKGKRKVTDKDIIEYLHAIDGYDGIELKGIEKQFNSSLSTYHDLLNIINDKEFLDDSSNETIIEEIIHTLTMFEDREMIKQRLSKFDNIFDKSVLKKLSRRHYTGWGKLSAKLINGIRDEKSGNTILDYLIDDGVSNRNFMQLIHDDALSFKKKIKKAQIIGDKDNIKQVVKSLPGSPAIKKGILQSIKIVDELVKVMGREPESIVVEMARENQYTNQGKSNSQQRLKRLEESLKGLGSKILKENVPTRLSKIDNNALQNDRLYLYYLQNGKDMYTGEELDIDRLSNYDIDHIIPQAFLKDDSIDNKVLVSSASNRGKSDDVPSLEVVKKRKTLWYQLLKSKLISQRKFDNLTKAERGGLSQEEKAGFIQRQLVETRQITKHVARLLDERFNNKKDENNRTLRTVKIITLKSSLVSQFRKDFELYKVREINDFHHAHDAYLNAVVASALLKKYPKLEPEFVYGDYPKYNSFRERKSATEKVYFYSNIMNIFKKSIPLADGTVIDRPLIEVNEETGESVWNKVADLNTVRKVLSYSQVNIVKKVEEQNHGLDRGKPKGLFNANLSSKPKPNSKENLVGAKEYLDPKKYGGYAGISNSFAILVKGTIEKGAKKKITNVLEFQGISILDRIYYRKDKLNFLLEKGYKDIELIIELPKYSLFELSDGSRRMLASILSTNNKRGEIHKGNQIFISQKFVKLLYHAKRISSTFNENHRKYVENHKKEFEELFYYILEFNENYVGAKKNGELLKSAFQSWQNHSIDELCSSFIGPTGSERKGLFELTSRGGAADFEFLGVKIPRYRDYTPSSLLKDATLIHQSVTGLYETRIDLGKLGED

SEQ ID NO: 761 - protein, 1392 aa, Streptococcus sanguinis
MENKNYSIGLDIGTNSVGWAVITDDYKVPSKKMKVFGNTDKHFIKKNLIGALLFDEGATAEDRRLKRTARRRYTRRKNRLRYLQEIFSEEISKLDSSFFHRLDDSFLVPKDKRGSKYPIFATLEEEKEYHKKFPTIYHLRKHLADSKEKTDLRLIYLALAHMIKYRGHFLYEESFDIKNNDIQKIFNEFISIYDNTFEGSSLSGQNAQVEAIFTDKISKSAKRERVLKLFSDEKSTSLFSEFLKLIVGNQADFKKHFDLEEKAPLQFSKDTYDEDLENLLGQIGDGFTDLFLVAKKLYDAILLSGILTVTDPSTKAPLSASMIERYESHQKDLAALKQFIKNNLPKRYNEVFSDQSKDGYAGYIDGKTTQEAFYKYIKNLLSKFEGADYFLDKIEREDFLRKQRTFDNGSIPHQIHLQEMNAILRRQGEHYPFLKENREKIEKILTFRIPYYVGPLARGNRDFAWLTRNSDQAIRPWNFEEIVDKASSAEEFINKMTNYDLYLPEEKVLPKHSLLYETFAVYNELTKVKFIAEGLRDYQFLDSGQKKQIVNQLFKEKRKVTEKDIIHYLHNVDGYDGIELKGIEKQFNASLSTYHDLLKIIKDKEFMDDPKNEEILENIVHTLTIFEDREMIKQRLAQYDSIFDEKVIKALTRRHYTGWGKLSAKLINGICDKQTGDTILDYLIDDGKINRNFMQLINDDGLSFKEIIQKAQVVGKTDDVKQVVQELPGSPAIKKGILQSIKIVDELVKVMGYAPESIVIEMARENQTTARGKKNSQQRYKRIEDSLKNLAPGLDSNILKENPTDNIQLQNDRLFLYYLQNGKDMYTGKPLDIDQLSSYDIDHIIPQAFIKDDSIDNRVLTSSKDNRGKSDNVPSLEVVQKRKAFWQQLLDSKLISERKFNNLTKAERGGLDERDKVGFIRRQLVETRQITKHVAQILDASFNTEVNEKNQKIRTVKIITLKSNLVSNFRKEFELYKVREINDYHHAHDAYLNAVVAKAILKKYPKLEPEFVYGDYQKYDLKRYISRFKPSKEIEKATEKYFFYSNLLNFFKEEVHYADGIIVKRENIEYSKDTGEIAWNKEKDFATIKKVLSYPQVNIVKKTEIQTHGLDRGKPKGLFNSNPSPKPSEDSKENLVPIKQGLDPRKYGGYAGISNSYAVLVKAIVEKGAKKQQKTILEFQGISILDKINFENNKENYLLKKRYIEILSTITLPKYSLFEFPDGTRRRLASILSTNNKRGEIHKGNELVLPGKYTTLLYHAKNINKKLEPEHLEYVEKHRNDFAKLLECVLNFNDKYVGALKNGERIRQAFTDWETVDIEKLCFSFIGPENSKNAGLFELTSQGSASDFEFLGVKIPRYRDYAPSSLLKATLIHQSITGLYETRIDLSKLGED

SEQ ID NO: 762 - protein, 1377 aa, Streptococcus sanguinis
MKKPYSIGLDIGTNSVGWAVITDDYKVPSKKMKVLGNTDKHFIKKNLIGALLFDEGTTAEDRRLKRTSRRRYTRRKNRLRYLQEIFSEEISKLDSSFFHRLDDSFLVPEDKRGSKYPIFATLEEEKEYHKKFPTIYHLRKHLADSKEKTDLRLIYLALAHMIKYRGHFLYEESFDIKNNDIQKIFNEFISIYDNTFEGSSLSGQNAQVEAIFTDKISKSTKRERVLKLFSDEKSTGLFSEFLKLIVGNQADFKKHFDLEEKAPLQFSKDTYDEDLENLLGQIGDGFADLFLVAKKLYDAILLSGILTVTDPSTKAPLSASMIERYENHQEDLAALKQFIKNNLSEKYAEVFSDQSKDGYAGFIDGKTTQEAFYKYIKNLLSKLEGADYFLNKIEREDFLRKQRTFDNGSIPHQIHLQEMNAILRRQGEHYLFLKENREKIEKILAFRIPYYVGPLARGNRDFAWLTRNSDQAIRPWNFEEVVDKASSAEDFINKMTNYDLYLPEEKVLPKHSLLYETFAVYNELTKVKFIAEGLRDYQFLDSGQKKQIVNQLFKDKRKVTEKDIIHYLHNVDGYDGIELKGIEKQFNASLSTYHDLLKIIKDKEFMDNPKNGEILENIIHTLTIFEDREMIKQRLAQYDTLFDEKVIKALTRRHYTGWGKLSAKLINGIRDKQTGKTILEYLIDDGDCNRNFMQLINDDGLSFKEIIQKAQVVGKTDDVKQVVQEIPGSPAIKKGILQSIKIVDELVKVMGHNPESIVIEMARENQTTAKGKKNSQQRYKRIEDALKNLAPGLDSNILKENPTDNIQLQNDRLFLYYLQNGKDMYTGKAIDINQLSNYDIDHIIPQAFIKDDSLDNRVLTSSKDNRGKSDNVPSIEVVQKRKAFWQQLLDSKLISERKFNNLTKAKRGGLDERDKVGFIKRQLVETRQITKHVAQLLDTRFNTEVNEENQKIRTVKIITLKSNLVSNFRKEFGLYKVREINDYHHAHDAYLNAVVAKAILKKYPKLEPEFVYGDYQKYDLKRYILKSKASNTIDKATEKYFFYSNLLNFFKEKVRYADGTIKKRENIEYSNDTGEIAWNKEKDFATIKKVLSLPQVNIVKKTEEQTVGQNGGLFDNNIVSKKKVVDASKLIPIKSSLSPEKYGGYARPTIAYSVLVIADIEKGKGKAKKLKRIKEIVGITIQDKKKFESNPVTYLEECGYKNINSNLIIKLPKYSLFEFNDGQRRLLASSIELQKGNELILPYHLTALLYHAQRINKISEPIHKQYVEAHQNEFKELLTTIISLSKKYIQKPNVELLLQQAFDQADKDIYQLSESFISLLKLTSFGAPGAFKFLGVEISQSSVRYKPNSQFLDTTLIHQSITGLYETRIDLSKLGED

SEQ ID NO: 763 - protein, 1370 aa, Streptococcus sanguinis
MKKPYSIGLDIGTNSVGWAVVTDDYKVPAKKMRVFGDTDRSHIKKNLLGTLLFDDGNTAESRRLKRTARRRYTRRRNRILYLQEIFTESMNEIDESFFHRLDDSFLVPEDKRGSKYPIFATLQEEKEYHKQFPTIYHLRKQLADSKEKSDVRLIYLALAHMIKYRGHFLYEETFDIKNNDIQKIFNEFINIYDNTFEGSSLSGQNAQVEAIFTDKISKSAKRERVLKLFPDEKSTGLFSEFLKLIVGNQADFKKHFDLEEKAPLQFSKDTYDEELENLLGQIGDDFADLFLIAKKLYDAILLSGILTVTDPSTKAPLSASMIERYENHQKDLAALKQFIKNNLPEKYVEVFSDQSKDGYAGYIDGKTTQEAFYKYIKNLLSKFEGADYFLDKIEREDFLRKQRTFDNGSIPHQIHLQEMNAILRRQGEHYPFLKENREKIEKILTFRIPYYVGPLARDNRDFSWLTRNSDEPIRPWNFEEVVDKARSAEDFIHRMTNYDLYLPEEKVLPKHSLLYETFAVYNELTKVKFIAEGLRDYQFLDSGQKKQIVNQLFKEKRKVTEKDIIHYLHNVDGYDGIELKGIEKQFNANLSTYHDLLKITKDKEFMDDPKNEEILENIVHTLTIFEDREMIKQRLAQYDTLFDEKVIKALTRRHYTGWGKLSAKLINGIRDKQSGKTILDYLIDDDKINRNFMQLINDDGLSFKEIIQKAQVVGKTDDVKQVVQELPGSPAIKKGILQSIKIVDELVKVMGYALESIVIEMARENQTTARGKKNSQQRYKRIEDALKNLAPGLDSNILKENPTDNIQLKNDRLFLYYLQNGKDMYTGKPLDINQLSSYDIDHIIPQAFIKDDSIDNRVLTSSKDNRGKSDNVPSLEVVQKRKAFWQQLLDSKLISERKFNNLTKAERGGLDERDKVGFIRRQLVETQQITKNVAQILDARFNTEVKEKNQKIRTVKIITLKSNLVSNFRKEFGLYKVREINNYHHAHDAYLNAVVAKAILKKYPKLEPEFVYGDYQKYDLKKYISRFKPSKEIEKATEKYFFYSNLLNFFKEEVLYADGTIRKRENIEYSKDTGEIAWDKEKDFATIKKVLSYPQVNIVKKREVQTGGFSKESILPKGNSDKLIPRKTKDILWDTTKYGGFDSPVIAYSILLIADIEKGKAKKLKTVKTLVGITIMEKAAFEENPITFLENKGYHNVRKENILCLPKYSLFELENGRRRLLASAKELQKGNEIVLPVCLTTLLYHSKNLHKLDEPEHLEYIQKHRNEFKDLLNLVSEFSQKYILAEANLEKIKDLYADNEQADIEILANSFINLLTFTALGAPAAFKFFGKDVDRKRYTTVSEILNATLIHQSITGLYETRIDLSKLGEE

SEQ ID NO: 764 - protein, 1421 aa, Streptococcus sanguinis
MTKFNKNYSIGLDIGVSSVGYAVVTEDYRVPAFKFKVLGNTEKEKIKKNLIGSTTFVSAQPAKGTRVFRVNRRRIDRRNHRITYLRDIFQKEIEKVDKNFYRRLDESFRVLGDKSEDLQIKQPFFGDKELETAYHKKYPTIYHLRKHLADADKNSPVADIREVYMAISHILKYRGHFLTLDKINPNNINMQNSWIDFIESCQEVFDLEISDESKNIADIFKSSENRQEKVKKILPYFQQELLKKDKSIFKQLLQLLFGLKTKFKDCFELEEEPDLNFSKENYDENLENFLGSLEEDFSDVFAKLKVLRDTILLSGMLTYTGATHARFSATMVERYEEHRKDLQRFKFFIKQNLSEQDYLDIFGRKTQNGFDVDKETKGYVGYITNKMVLTNPQKQKTIQQNFYDYISGKITGIEGAEYFLNKISDGTFLRKLRTSDNGAIPNQIHAYELEKIIERQGKDYPFLLENKDKLLSILTFKIPYYVGPLAKGSNSRFAWIKRATSSDILDDNDEDTRNGKIRPWNYQKLINMDETRDAFITNLIGNDIILLNEKVLPKRSLIYEEVMLQNELTRVKYKDKYGKAHFFDSELRQNIINGLFKNNSKRVNAKSLIKYLSDNHKDLNAIEIVSGVEKGKSFNSTLKTYNDLKTIFSEELLDSEIYQKELEEIIKVITVFDDKKSIKNYLTKFFGHLEILDEEKINQLSKLRYSGWGRYSAKLLLDIRDEDTGFNLLQFLRNDEENRNLTKLISDNTLSFEPKIKDIQSKSTIEDDIFDEIKKLAGSPAIKRGILNSIKIVDELVQIIGYPPHNIVIEMARENMTTEEGQKKAKTRKTKLESALKNIENSLLENGKVPHSDEQLQSEKLYLYYLQNGKDMYTLDKTGSPAPLYLDQLDQYEVDHIIPYSFLPIDSIDNKVLTHRENNQQKLNNIPDKETVANMKPFWEKLYNAKLISQTKYQRLTTSERTPDGVLTESMKAGFIERQLVETRQIIKHVARILDNRFSDTKIITLKSQLITNFRNTFHIAKIRELNDYHHAHDAYLAVVVGQTLLKVYPKLAPELIYGHHAHFNRHEENKATLRKHLYSNIMRFFNNPDSKVSKDIWDCNRDLPIIKDVIYNSQINFVKRTMIKKGAFYNQNPVGKFNKQLAANNRYPLKTKALCLDTSIYGGYGPMNSALSIIIIAERFNEKKGKIETVKEFHDIFIIDYEKFNNNPFQFLNDTSENGFLKKNNINRVLGFYRIPKYSLMQKIDGTRMLFESKSNLHKATQFKLTKTQNELFFHMKRLLTKSNLMDLKSKSAIKESQNFILKHKEEFDNISNQLSAFSQKMLGNTTSLKNLIKGYNERKIKEIDIRDETIKYFYDNFIKMFSFVKSGAPKDINDFFDNKCTVARMRPKPDKKLLNATLIHQSITGLYETRIDLSKLGED

SEQ ID NO: 765 - protein, 317 aa, Streptococcus sp.
FEDSILFSYQVDSKFNRKISDATIYATRKAKLDKEKSEETYVLGKIKDIYSQAGYDAFIKIYNKDKSKFLMYHKDPQTFEKVIEEILRTYPSKELNDKNKEIPCNPFEKYRQENGPIRKYSKKSNGPEIKSLKYYDNKLGNHIDITPESSDNQVVLQSLKPWRTDVYFNHQTKKYELMGLKYSDLSFEKGSGKYSISNQKYNSIKRIEGIDEQSEFKFTLYKNDLILIKDSENNEQKLFRFNSRNDTAKHYIELKPYDKAKFDGEQELITILGNVAKGGRCLKGLNKSNISIFKVKTDVLGKKHIIKKEGDEPKLKF

SEQ ID NO: 766 - protein, 1420 aa, Streptococcus sp.
MAKFNKNYSIGLDIGVSSVGYAVVTEDYRVPAFKFKVLGNTEKEKIKKNLIGSTTFVPAQSAQGTRVFRVNRRRIDRRNHRIAYLRDIFQKEIEKIDKNFYRRLDESFRVLGDKSEDIQIKQPFFGNKELETAYHKKYPTIYHLRKHLADADKNSPVADIREVYMVLSHILKYRGHFLTLGKIDPNNINMQNSWIDFIESCQDAFDLEISDESKTIAAIFKSSENRQEKVKQILSYFQQELLKKDKSIFKQLLQLLFGLKTKFKDCFELEEEPDLNFSKENYDENLENLLGALEEDFSDVFAKLKILRDTILLSSMLTYTGATHARFSATMVERYEEHRKDLQRFKSFVKQNLSEQDYLDIFGRKTPTGFDVDKETKGYVGYISNKMVLTNPQKQKTIQQNFYDYISGKITGIEGAECFLNKISDGTFLRKLRTTDNGAIPNQIHAYELEKIIERQGRDYPFLLENKDKLLSILTFKIPYYVGPLAKGNNSRFAWIKRTTSQDVLDDNDEDTRNGKIRPWNYHKLINMDETRDAFIINLIGNDIILLNEKVLPKRSLIYEEVMLQNELTRVKYKDKYGKIHFFNSELRQEIINNLFKTNSKRVSSAMLLSYLENFTNLQAVEIVSGIEKGKSLNSTLKTYNDLKTIFSEELLDSEIYQKELEEIIKVITVFDDKKSIKNYLTKYFGHLEFLNEEKINQLSKLRYTGWGRYSGKLLLGIRDEDTGFNLMQFLRNDDENRNLTQLISDTTLSFDSAIKAIQSKSTVEDDVFEEIKNLAGSPAIKRGILNSIKIVDELVQIIGYPPQNIIIEMARENMTTEEGQKKAKTRKSKLESALKNIEDSVLESGKVPHSDEQLQSEKLYLYYLQNGKDMYSLDKTGSPTPLYRDQLDQYEVDHIIPYSFLPIDSIDNKVLTHRENNQRKLNNIPDKETVANMKPFWEKLYNAKLISQTKYQRLTTSERTPDGVLTESMKAGFIERQLVETRQIIKHVARILDNRFSDTKIITLKSQLVTNFRNTFHIAKIRELNDYHHAHDAYLAVVVGQTLLKAYPKLAPELIYGHHAHFNRHEENKATLRKHLYSNIMRFFNNPDSKVSKDIWDCNRDLPIVKDVIYNSQINFVKRTMIKKGAFYNQNPVGKLNKQIAANNRYPLKTKVSSLDTSIYGGYGPMNSALSIIIIAERFNEKKGKIETVKEFHDIFIIDYEKFNNNPFQFLNNVSEEGFLKKNDLNRVLAFYRISKYSLMQKIDGTRMLFESKSNLHKVTQFKLTKTQNELFFHMKRLLTKSNLMDLKSESAIKESQNFIQTHQNEFDNIADRLSNYSQKMLGETKSLQTLINGYNERPIKQIDNNEETIRYYYDNFIKMFSFVKSGAPKDIINFFNDKYTVPRMRPKPDRKMLDATLIHQSITGLYETRIDLSKLGED

SEQ ID NO: 767 - protein, 1371 aa, Streptococcus sp.
MENKNYSIGLDIGTNSVGWSVITDDYKVPSKKMKVLGNTDKHFIKKNLIGALLFDEGTTAEARRLKRTARRRYTRRKNRLRYLQEIFSEEIGKVDSSFFHRLDDSFLIPEDKRGSKYPIFATLAEEKKYHKQFPTIYHLRKQLADSKEKTDLRLIYLALAHMIKYRGHFLYEEAFDIKNNDIQKIFNEFISIYNNTFEGNSLSGQNVQVEAIFTDKISKSAKRERVLKLFPDEKSTGLFSEFLKLIVGNQADFKKHFDLEEKAPLQFSRDTYDEDLENLLGQIGDDFADLFLVAKKLYDAILLSGILTVTNPSTKAPLSASMIERYENHQKDLASLKQFIKNNLPEKYDEVFSDQSEDGYAGYIDGKTTQETFYKYIKNLLSKFEGADYFLDKIEREDFLRKQRTFDNGSIPHQIHLQEMNAILRRQGEHYPFLKENKEKIEKILTFRIPYYVGPLARGNRDFAWLTRNSDQAIRPWNFEEIVDKASSAEDFINKMTNYDLYLPEEKVLPKHSLLYETFAVYNELTKVKFIAEGLRDYQFLDSGQKKQIVTQLFKEKRKVTEKDIIQFLHNVDGYDGIELKGIEKQFNASLSTYHDLLKIIKDKAFMDDAKNEAILENIVHTLTIFEDREMIKQRLAQYDSLFDEKVIKALTRRHYTGWGKLSAKLINGISDKQTGNTILDYLIDDGEINRNFMQLINDDGLSFKEIIQKAQVVGKTNDVKQVVQELPGSPAIKKGILQSIKIVDELVKVMGHAPESIVIEMARENQTTARGKKNSQQRYKRIEDSLKILASGLNSKILKEHPTDNIQLQNDRLFLYYLQNGKDMYTGEALDINQLSSCDIDHIIPQAFIKDDSLDNRVLTSSKDNRGKSDNVPSLEVVDKMKVFWQQLLDSKLISYRKFNNLTKAERGGLNELDKVGFIKRQLVETRQITKHVAQILDARFNKEVTEKDKKNRTVKIITLKSNLVSNFRKEFELYKVREINDYHHAHDAYLNAVVAKAILKKYPKLEPEFVYGDYQKYDLKRYISRSKDPKEIEKATEKYFFYSNLLNFFKEEVHYADGTIVKRENIEYSKDTGEIAWNKEKDFATIKKVLSLPQVNIVKKREVQTGGFSKESILPKGNSDKLIPRKTKDILWDTTKYGGFDSPVIAYSILLIADIEKGKAKKLKTVKTLVGITIMEKDAFEKNPIAFLENKGYHNVCKENILCLPKYSLFELENGRRRLLASAKELQKCNEIVLPVYLTTLLYHSKNVHKLDEPGHLEYIQKHRNEFKDLLNLVSEFSQKYVLADANLEKIKNLYADNEQADIEILANSFINLLTFTALGAPAAFKFFGKDVDRKRYTTVSEILNATLIHQSITGLYETRIDLSKLGED

SEQ ID NO: 768 - protein, 93 aa, Streptococcus sp.
MILIKDSENNEQKLFRFNSRNDTAKHYVELKPYDKARFDGQQELITILGNVAKGGQCLKGLNKSNISIFKVKTDVLGKKHIIKKEGDEPKLKF

SEQ ID NO: 769 - protein, 1121 aa, Streptococcus sp.
MNGLVLGLDIGIASVGVGILEKNSGKIIHANSRLFPAATADNNVERRKNRQARRLHRRKKHRGVRFQDLFEDYGLLTDFSKVSINLNPYRLRVDGLNQQLTNEELFIALKNIVKRRGISYLDDASEDGGTVSSDYGKAVEENRKLLAEQTPGQIQLERFEKYGQVRGDFTVVENGEKRRLINVFSTSAYRKEAERILRKQQEFNSKITDEFIEDCLKILTGKRKYYHGPGNEKSRTDYGRFRTDGTTLDNIFGILIGKCTFYPDEYRASKASYTAQEFNLLNDLNNLTVPTETKKLSEEQKKVIVEYAKEAKTLGASTLLKYIAKMIDASVDQIRGYRVDVNNKPEIHTFEAYRKMQSLETISVGELSRNVLDELAHILTLNTEREGIEEAINTKLKDSFSQDQVLELVQFRKNNSSLFSKGWHNFSLKLMMELIPELYETSEEQMTILTRLGKQKSKEISKRTKYIDEKELTEEIYNPVVAKSVRQAIKIINEATKKHGIFDNIVIEMARENNEEDAKKDYIKRQKANQDEKNAAMEKAAFQYNGKKELPDSIFHGQKELATKIRLWHQQGEKCLYTGKNIPISDLIHNQYKYEIDHILPLSLSFDDSLSNKVLVLATANQEKGQRTPFQALDSMDDAWSYREFKSYVKESKLLGNKKKEYLLTEEDISKIEVKQKFIERNLIDTRYSSRVVLNALQDFYKAHKFDTTISVVRGQFTSQLRRKWGLEKSRETYHHHAVDALIIAASSQLRLWKKQNNPLIAYKEGQFVDSETGEIISLSDDEYKELVFKAPYDHFVDTLSSKTFEDSILFSYQVDSKFNRKISDATIYATRKAKLDKEKSEETYVLGKIKDIYSQAGYDAFIKIYNKDKSKFLMYHKDPQTFEKVIEEILRTYPSKELNDKNKEIPCNPFEKYRQENGPIRKYSKKSNGPEIKSLKYYDNKLGNHIDITPESSDNQVVLQSLKPWRTDVYFNHQTKKYELMGLKYSDLSFEKGSGKYSISNQKYNSIKRIEGIDEQSEFKFTLYKNDLILIKDSENNEQKLFRFNSRNDTAKHYIELKPYDKAKFDGEQELITILGNVAKGGRCLKGLNKSNISIFKVKTDVLGKKHIIKKEGDEPKLKF

SEQ ID NO: 770 - protein, 1026 aa, Streptococcus sp.
MNGLVLGLDIGIASVGVGILEKNSGKIIHANSRLFPAATADNNVERRKNRQARRLNRRKKHRGVRFQDLFEDYGLLTDFSKVSINLNPYRLRVDGLNQQLTNEELFIALKNIVKRRGISYLDDASEDGGAVSSDYGKAVEENRKLLAEQTPGQIQLERFEKYGQVRGDFTVVENGEKRRLINVFSTSAYRKEAEKILRKQQEFNNQITDEFIEDYLKILTGKRKYYHGPGNEKSRTDYGRFRTDGTTLDNIFGVLIGKCTFYPNEYRASKSSYTAQEFNLLNDLNNLTVPTETKKLSEEQKKVIVEYAKEAKTLGASTLLKYIVKMIDASVDQISGYRVDVNNKPEMHTFEVYRKMQSLETISVGELSRNVLDELAHILTLNTEREGIEEAINSKLMGVFSQDQVLELVQFRKNNSSLFSKGWHNFSLKLMMELIPELYETSEEQMTILTRLGKQKSKETSKRTKYIDEKELTEEIYNPVVAKSVRQAIKIINEATKKHGIFDNIVIEMARENNEEDAKKDYIKRQKANQDEKNAAMEKAAFQYNGKKELPGNIFNGHKELATKIRLWHQQGEKCLYTGKTIPISDLIHNQYKYEIDHILPLSLSFDDSLSNKVLVHATANQEKGQRTPFQALDSMDDAWSYREFKSYVKDLKSLSNKKKDYLLTEEDISKIEVKQKFIERNLVDTRYSSRVVLNALQDFYKSHQFDTTISVVRGQFTSQLRRKWGLEKSRETYHHHAVDALIIAASSQLRLWKKQNNPLITYKEGQFIDSQTGEIISLTDDEYKELVFKAPYDHFVDTLHSKTFEDGILFSYQVDSKYNRKISDATIYATRKAKLDKDKSEETYVLGKIKDIYSQAGYDAFIKIYNKDKRKFLMYHKDPQTFEKVIEEILRTYPSKERNDKNKEVPCNPFEKYRQENGPIRKYSKKGNGPEIKCLKYYDNKLGNYIDISPDGSDNQVVLQSLKPWRTDVYFNHQTKKYELMGLKYSDLSFEKGSGKYSISNEKYNSIKRIEGVNEQSEFKFTLYK

SEQ ID NO: 771 - protein, 1377 aa, Streptococcus sp.
MNNKPYSIGLDIGTNSVGWSVITDDYKVPSKKMKVLGNTDKRFIKKNLIGALLFDEGTTAEARRLKRTARRRYTRRKNRLRYLQEIFAEEMSKVDSSFFHRLDDSFLIPEDKRGSKYPIFATLVEEKEYHKQFPTIYHLRKQLADSKEKADLRLIYLVLAHMIKYRGHFLYEEAFDIKNNDIQKIFNEFISIYDNTFEGSSLSGQNAQVETIFTDKISKSAKRERVLKLFPDEKSTGLFSEFLKLIVGNQADFKKHFDLEEKAPLQFSKDTYDEDLENLLEQIGDDFADLFVAAKKLYDAILLSGILTVTDPSTKAPLSASMIERYENHQKDLAVLKQFIKTNLPEKYVEVFSDQSKDGYAGYIDGKTTQEAFYKYIKNLLSKFDGADYFLDKIEREVFLRKQRTFDNGSIPHQIHLQEMNTILRRQGEHYPFLKENKEKIEKILTFRIPYHVGPLARGNRDFAWLTRNSDQAIRPWNFEEIVDKASSAEDFINKMTNYDLYLPEEKVLPKHSLLYETFAVYNELTKVKFIAEGMRDYQFLDSGQKKKIINQLFKKKRKVTEDDIIDCLQKIDNYDGIELKGIEKQFNASLSTYHDILKIIRDKEFMDDPKNGDILENVIHTLTIFEDREMIKQRLAQYNSIFDEKVIKALSRKHYTGWGKLSAKLIDGIRDKQTGKTILDYLMDDGKSNRNFMQLIKDDELSFTEIIQKAQVVGDTDNLRQVVQNLPGSPAIKKGILQSIKIVDELVKVMGHAPESIVIEMARENQTTARGKKNSQQRYKRIEDSLKNLASGLDSNILKENPTDNIQLQNDRLFLYYLQNGKDMYTGEALNINQLSSYDIDHIIPQAFIKDDSLDNRVLTSSKDNRGKSDNVPSLEVVEKMKAFWQQLLDSKLISERKYNNLTKAERERGGLNELDKVGFIKRQLVETRQITKHVAQILDARFNKEVTEKNKKNRNVKIITLKSNMVSNFRKEFGLYKVREINDYHHAHDAYLNAVVAKAILKKYPKLEPEFVYGDYQKYDLKRYISRSKDPKEVEKATEKYFFYSNLLNFFKEEVHYADGTIVKRENIEYSKDTGEIAWNKEKDFATIKKVLSLPQVNIVKKTEEQTVGQNGGLFDNNIVSKKKVVDASKLIPIKSGLSPEKYGGYARPTIAYSVLVTYKQNNKIKNTMVGIPVLTKLEFERDPNLYLRNLGINNVSHVIKLVKYTVLEFKHKYGTYRRFIVSNQELKRANQIFVTTKQMKLISQYTTLDKNEHDSLLKNNQQLIQSIWNQFLEFMLATDLVNKKQYDELILTNNQTIEECRNIMNRVITTLSFTNINAGQKKIIFDDTLSLPIKRWQFTDSDKMVKKIIESTLIHQSITGLYETRIDLSKLGED

SEQ ID NO: 772 - protein, 1371 aa, Streptococcus sp.
MNNNNYSIGLDIGTNSVGWAVITDDYKVPSKKMRVLGNTDKRFIKKNLIGALLFDEGTTAEDRRLKRTARRRYTRRKNRLRYLQEIFAEEMSKVDSSFFHRLDDSFLVPEDKSGSKYPIFATLAEEKEYHKKFPTIYHLRKHLADSKEKADLRLIYLALAHITKYRGHFLYEEAFDIKNNDIQKIFNEFINIYDNTFEGSSLSGQNAQVEAIFTGKISKSVKREHVLKLFPDEKSTGLFSEFLKLIVGNQADFKKHFDLEEKASLQFSKDTYDEDLENLLGQIGDDFADLFLVAKKLYDAILLSGILTVTDPSTKAPLSASMIERYENHQEDLAALKQFIKNNLPEKYAEVFSDQSKDGYAGYIDGKTTQEAFYKYIKNLLSKFEGADYFLDKIEREDFLRKQRTFDNGSIPHQIHLQEMNAILRRQGEHYPLLKENKEKIEKILTFRIPYYVGPLARGNRDFAWLTRNSDQAIRPWNFEEIVDKASSAESFINKMTNYDLYLPEEKVLPKHSLLYETFAVYNELTKVKFIAEGLRDYQFFDSGQKKQIVNQLFKEKRKVTEKDIIHYLHNVDGYDGIELKGIEKQFNASLSTYHDLLKIIKDKEFMDNHKNQEILENIVHTLTIFEDREMIKQRLAQYDSIFDEKVIKALTRRHYTGWGKLSAKLINGICDKKTGKTILDYLIDDGYNNRNFMQLINDDGLSFKEIIQKAQVVGKTDDLTQVVRELSGSPAIKKGILQSIKIVDELVKIMGYAPESIVIEMARENQTTAKGKKNSQQRYKRIEDALKNLAPGLDSTISKENPTDNIQLQNDRLFLYYLQNGKDMYTGEALDINQLSSYDIDHIIPQAFIKDDSLDNRVLTSSKDNRGKSDNVPSLEVVKKRKAFWQQLLDSKLISERKFNNLTKAERGGLDERDKVGFIKRQLVETRQITKHVARILDARFNTEVSEKNQKIRSVKIITLKSNLVSNFRKEFKLYKVREINDYHHAHDAYLNAVVAKAILKKYPKLEPEFVYGDYQKYDLKRYISKSKDPKEVEKATEKYFFYSNLLNFFKEEVHYADGTIVKRENIEYSKDTGEIAWNKEKDFVTIKKVLSYPQVNIVKKREVQTGGFSKESILPKGNSDKLIPRKTKDILWDTTKYGGFDSPVIAYSILLIADIEKGKAKKLKTVKTLVGITIMEKAAFEKNPITFLENKGYHNVRKENILCLPKYSLFELENGRRRLLASAKELQKGNEIVLPVYLTTLLYHSKNVHKLDEPEHLEYIQKHRYEFKDLLNLVSEFSQKYVLAEANLEKIKSLYVDNEQADIEILANSFINLLTFTALGAPAAFKFFGKDVDRKRYTTVSEILNATLIHQSITGLYETRIDLSKLGED

SEQ ID NO: 773 - protein, 1139 aa, Streptococcus sp.
MSDLVLGLDIGIGSVGVGILNKVTGEIIHKNSRIFPAAQAENNLERRTNRQGRRLTRRKKHRRVRLNHLFEESGLITDFTKVSINLNPYQLRVKGLTAELSNEELFIALKNMVKHRGISYLDDASDDGNSSVGDYAQIVKENSKQLETKTPGQIQLERYQKYGQLRGDFTVEEDGRKHRLINVFPTSAYHAEALRILQTQQEFNPQITDEFINSYLEILTGKRKYYHGPGNEKSRTDYGKYTTKKDAQGQYITLNNIFGILIGKCTFYPEEYRAAKASYTAQEFNLLNDLNNLTVPTETKKLSEEQKYQIITYVKNEKAMGPAKLFKYIAKLLSCDVADIKGYRIDKSDKAEIHTFEAYRKMKTLETLDVKKMAREELDKLAYVLTLNTEREGIQEALDHEFADGTFSQEQVDELVQFRKANSSIFGKGWHSFSVKLMMELIPELYATSEEQMTILTRLGKQKTTSSSNKTKYIDEKQLTEEIYNPVVAKSVRQAIKIVNAAIKKYGDFDNIVIEMARETNEDDEKKAIQKIQKANKAEKDAAMRKAANQYNGKAELPHSVFHGHKQLATKIRLWHQQGERCLYTGKTISIHDLINNPNQFEIDHILPLSITFDDSLANKVLVYATANQEKGQRTPYQALDSMDDAWSFRELKAFVRESKALSNKKKEYLLTEEDISKFDVRKKFIERNLVDTRYASRVVLNALQEHFRTHKIDTKVSVVRGQFTSQLRRHWGIEKTRDTYHHHAVDALIIAASSQLNLWKKQKNTLVSYSEDQLLDIETGELISDDEYKESVFKAPYQHFVDTLKSKEFEDSILFSYQVDSKFNRKISDATIYATRKAKLDKEKKEYTYTLGKIKDIYALGTKTPSKTGFYKFLDLYKKDKSQFLMYQKDRRTWDEVIEKILEQYRPFKEKDKNGKEVDFNPFEKYRIENGPIRKYSRKGNGPEIKSLKYYDNLLGRFVDITPSESKNPVALLSLNPWRTDVYYNTETRKYEFLGLKYADLCFEKGGSYGISKVKYNKIREKEGIGKNSEFKFTLYKNDLILIKDTETNRQQIFRFWSRTGKDNPKSFEKHKLELKPYEKTRFEKGEELKVLGKVPPSSNRLQKNMQIENLSIYKVRTDVLGNQHIIKNEGDKPKLDF

SEQ ID NO: 774 - protein, 1375 aa, Streptococcus sp.
MSNKSYSIGLDIGTNSVGWAVITDDYKVPSKKMKVLGNTDKHFIKKNLIGALLFDEGTTAEDRRLKRTARRRYTRRKNRLRYLQEIFSQEISKVDSSFFHRLDDFFLVPEDKRGSKYPIFATLVEEKEYHKKFPTIYHLRKHLADSKEKTDLRLIYLALAHMIKYRGHFLYEESFDIKNNDIQKIFSEFISIYDNTFEGKSLSGQNAQVEAIFTDKISKSTKRERVLKLFPDEKSTGLFSEFLKLIVGNQADFKKHFDLEEKAPLQFSKDTYDEDLENLLGQIGDDFADLFLVAKKLYDAILLSGILTVKDLSTKAPLSASMIERYENHQKDLAALKQFIQNNLQEKYDEVFSDQSKDGYAGYIDGKTTQEAFYKYIKNLLSKFEGADYFLDKIEREDFLKKQRTFDNGSIPHQIHLQEMNAIIRRQGEHYPFLQENKEKIEKILTFRIPYYVGPLARGNGDFAWLTRNSDQAIRPWNFEEIVDQASSAEDFINKMTNYDLYLPEEKVLPKHSLLYETFAVYNELTKVKFIAEGLTRYQFLDKKQKKDIFDTFFKAENKRKVTEKDIIHYLHNVDGYDGIELKGIEKQFNASLSTYHDLLKIIKDKAFMDDSKNEEILENIIHTLTIFEDREMIKQRLAQYDSLFDEKVIKALTRRHYTGWGKLSAKLINGIRDKKSGKTILDYLIDDGEINRNFMQLIHDDGLSFKEIIQKAQVFGKTNDVKQVVQELPGSPAIKKGILQSIKIVDELVKVMGHAPESIVIEMARENQTTARGKKNSQQRYKRIEDSLKNLASGLDSNILKENPTDNIQLQNDRLFLYYLQNGRDMYTGKPLEINQLSNYDIDHIIPQAFIKDDSLDNRVLTSSKDNRGKSDNVPSLEVVEKMKAFWQQLLDSKLISERKFNNLTKAERERGGLNELDKVGFIKRQLVETRQITKHVAQFLDARFNKEVTEKDKKNRNVKIITLKSNLVSNFRKEFGLYKVREINDYHHAHDAYLNAVLAKAILKKYPKLEPEFVYGDYQKYDLQRYISKSREPKEVEKATQKYFFYSNLLNFFKEEVHYADGTIVKRENIEYSKDTGEIAWNKEKDFATVKKVLSLPQVNIVKKTEVQTGGFSKESILPKGNSDKLIPRKTKEILWDTTKYGGFDSPVIAYSILLIADIEKGKAKKLKTVKTLVGITIMEKATFEKNPITFLENKGYHNVRKENILCLPKYSLFELESGRRRMLASAKELQKGNEIVLPVYLTTLLYHSKNVHKLDEPEHLEYIQKHRYEFKDLLNLVSEFSQKYVLADANLEKIKNLYADNEQADIEILANSFINLLTFTALGAPAAFKFLGKDVDRKRYTTVSEILNATLIHQSITGLYETRIDLSKLGED

SEQ ID NO: 775 - protein, 206 aa, Streptococcus sp.
RTPFQALDSMDDAWSYREFKSYVKESKLLGNKKKEYLLTEEDISKIEVKQKFIERNLIDTRYSSRVVLNALQDFYKAHKFDTTISVVRGQFTSQLRRKWGLEKSRETYHHHAVDALIIAASSQLRLWKKQNNPLIAYKEGQFVDSETGEIISLSDDEYKELVFKAPYDHFVDTLSSKTFEDSILFSYQVDSKFNRKISDATIYATR

SEQ ID NO: 776 - protein, 1122 aa, Streptococcus suis
MSNGKILGLDIGIASVGVGVIDAQTGEIIHASSRIFPSANAANNAERRTFRGSRRLIRRKKHRIKRLDDLFNDFHINLDGEMSTDNPYVLRVKGLSQKLTVEELYISIKNIMKRRGISYLDDAESDNEAGRSDYAKAIERNRQLLTSKTPGEIQLERLEKYGQLRGNFTIIDEEGQSQQIINVFSTSDYVKEVEKILDCQKMYHKFISDEFCDKLIELLREKRKYYVGPGNEKSRTDYGIYRTDGTTLENLFGILIGKCTFYPDQYRSSRASYTAQEFNFLNDLNNLTVPTETKKLSQEQKEFLVNYAKETSVLGAGKILQQIAKLADCKVEDIRGYRLDNKDKPELHTFETYRAMKGLVPLVDIGVLSREQLDILADILTLNTDFEGIREALKKQLPNVFDEKQVKGLASFRKSKSQLFAKGWHNLSQKIMLEVIPELYATSDEQMTILTRLGKFEKSSVAEYPSSINVDEITDEIYNPVVAKSIRQTIKIINASIKKWDEFDQIVIEMPRDRNEDEEKKRIADGQKANAKEKADSILRAAELYCAGKVLPDYVYNGHNQLATKIRLWYQQGERCIYTGQPISIHDLIHNQNQYEIDHILPLSLTFDDSLSNKVLVLATANQEKAQRTPYNYLKSATSAWSYREFKDYVTKRKGIGKKKCEYLTFEEDINGFEVRSKFIQRNLVDTRYASKVILNALQDYFKISGIQTKVSVVRGQFTSQLRHKWGIEKTRETYHHHAVDALIIAASSQLRLWKKQESPLVVDYQEGRQVDLETGEILELTDEQYKELVYQPPYQGFVNTISSSAFDNEILFSYQVDSKVNRKISDATIYATRNAQLGKDKTEGIYVLGKIKDIYTQAGYEAFLKRYTKDKTSFLMYHKDLDTWEKVIEIILRDYREYDEKGKEIGNPFERYRRENGYVKKYSRKGNGTAIKSLKYYDNKLGNHIDITPENSRNAVVLQSLKPWRTDVYFNKETGKYEFLGIKYSDLSFEKGTGEYGISQEKYDSIKIAEGVAKKSIFKFTLYKQDLLFIKDIENNFGKLLRFTSKNDTSKHYVELKPYDKNKFGTEEPLLPVLGNVAKSGQCIKGLNKSNISIYKVRTDILGYRHFIKQEGEHPQLKFKK

SEQ ID NO: 777 - protein, 1381 aa, Streptococcus suis
MVKKKYAIGIDIGTNSVGWSIVTDDYKVPSKKMKVFGNTEKRYIKKNLLGTLLFDEGNTAENRRLKRTARRRYTRRRNRILYLQEIFAEEINKIDDSFFQRLDDSFLIVEDKQGSKHPIFGTLQEEKEYHKQFPTIYHLRKQLADSSQKADIRLIYLALAHIIKYRGHFLFEGDLKSENKDVQHLFNDFVEMFDKTVEGSYLSENLPNVADVLVEKVSKSRRLENILHYFPNEKKNGLFGNFLALALGLQPNFKTNFELAEDAKIQFSKETYEEDLEELLGKIGDDYADLFIATKSLYDGILLAGILSTTDSTTKAPLSSSMVNRYEEHQKDLALLKNFIHQNLSDSYKEVFNDKLKDGYAGYIEGKTTQENFYRFIKKAIEKIEGSNYFIDKIDREDFLRKQRTFDNGSIPHQIHLQEMHAIIRRQAEFYPFLVENQDKIEKILTFRIPYYVGPLARGKSEFAWLNRKSDEKIRPWNFDEMVDKETSAENFITRMTNYDRYLPDQKVLPKHSLLYEKFAVYNELTKVKFIAEGMRDYQFLDSGQKKDIVKTLFKTKRKVTAKDIKAYLENSNGYAGVELKGLEEQFNASLPTYHDLLKILRDKAFIDAEENQEILEDIVLTLTLFEDREMIRKRLEKYKDILTEEQRKKLERRHYTGWGRLSAKLINGILDKVTRKTILGYLIDDGTSNRNFMQLINDDTLSFVDEIRLAQGSGEAEDYRAEVQNLAGSPAIKKGILQSLKIVDELIEVMGYEPEHIVVEMARENQFTNQGRRNSQQRINRLENALKDFGSKILEEQKPYGVSKVNNIHLQSDRLFLYYLQNGKDMYTDEELDIDHLSEYDIDHIIPQAFIKDDSLDNKVLTKSAKNRGKSDDVPSMEIVHNRKNFWRQLLKSKLISQRKFDNLTKAERGGLTNEDKARFIQRQLVETRQITKHVARMLDTRFNTKLDEAGNRIRDPKVNIITLKSNLVSQFRKDYQLYKIREINNYHHAHDAYINAVVATALLKKYPQLAPEFVYGEYPTYNSYNSRKSATEKVLFYSNIMNFFKRIVVHSKTGEVRIRPVIEVNKETGEIVWDKKSDFRTVRKVLSYPQVNVVKKTEVQNHGLDRGKPKGFYNANLSPRPKEGSVENLVPAKQSFDTKRYGGYAGISNSYAVLVNGIIEKGKKKSKAEVTEFQGISILARKDFDKNPKQYLLNLGYKDIKSIIKLPKYSLFELENGSRRMLASILSTNNKRGEIHKGNEMYLPDKFVTLLYHAMRVNRTLEPGHKKYVETHRHVFDELLIYILEYNEKIVGAKANGKRIVEAYSARKDTDNLEELCNSFINLLNLTALGSAVDFEFLGTKIPRYRDYTPSSLLKATLIHQSVTGLYETRIDLSKLGGD

SEQ ID NO: 778 - protein, 39 aa, Streptococcus thermophilus
GRCIKGLGKSNISIYKVRTDVLGNQHIIKNEGDKPKLDF

SEQ ID NO: 779 - protein, 302 aa, Streptococcus thermophilus
MIRRKKHRIVRLNRLFEESGLITDFTKISINLNPYQLRVKGLTDELSNEELFIALKNMVKHRGISYLDDASDDGNSSVGDYAQIVKENSKQLETKTPGQIQLERYQTYGQLRGDFTVEKDGKKHRLINVFPTSAYRSEALRILQTQQEFNPQITDEFINRYLEILTGKRKYYHGPGNEKSRTDYGRYRTSGETLDNIFGILIGKCTFYPDEFRAAKASYTAQEFNLLNDLNNLTVPTETKKLSKEQKNQIINYVKNEKAMGPAKLFKYIAKLLSCDVADIKGYRIDKSGKAERFILSKPIEK

SEQ ID NO: 780 - protein, 1121 aa, Streptococcus thermophilus
MSDLVLGLDIGIGSVGVGILNKVTGEIIHKNSRIFPAAQAENNLVRRTNRQGRRLTRRKKHRIVRLNRLFEESGLITDFTKISINLNPYQLRVKGLTDELSNEELFIALKNMVKHRGISYLDDASDDGNSSVGDYAQIVKENSKQLETKTPGQIQLERYQTYGQLRGDFTVEKDGKKHRLINVFPTSAYRSEALRILQTQQEFNPQITDEFINRYLEILTGKRKYYHGPGNEKSRTDYGRYRTSGETLDNIFGILIGKCTFYPDEFRAAKASYTAQEFNLLNDLNNLTVPTETKKLSKEQKNQIINYVKNEKAMGPAKLFKYIAKLLSCDVADIKGYRIDKSGKAEIHTFEAYRKMKTLETLDIEQMDRETLDKLAYVLTLNTEREGIQEALEHEFADGSFSQKQVDELVQFRKANSSIFGKGWHNFSVKLMMELIPELYETSEEQMTILTRLGKQKTTSSSNKTKYIDEKLLTEEIYNPVVAKSVRQAIKIVNAAIKEYGDFDNIVIEMARETNEDDEKKAIQKIQKANKDEKDAAMLKAANQYNGKAELPHSVFHGHKQLATKIRLWHQQGERCLYTGKTISIHDLINNSNQFEVDHILPLSITFDDSLANKVLVYATANQEKGQRTPYQALDSMDDAWSFRELKAFVRESKTLSNKKKEYLLTEEDISKFDVRKKFIERNLVDTRYASRVVLNALQEHFRAHKIDTKVSVVRGQFTSQLRRHWGIEKTRDTYHHHAVDALIIAASSQLNLWKKQKNTLVSYSEDQLLDIETGELISDDEYKESVFKAPYQHFVDTLKSKEFEDSILFSYQVDSKFNRKISDATIYATRQAKVGKDKADETYVLGKIKDIYTQDGYDAFMKIYKKDKSKFLMYRHDPQTFEKVIEPILENYPNKQMNEKGKEVPCNPFLKYKEEHGYIRKYSKKGNGPEIKSLKYYDSKLGNHIDITPKDSNNKVVLQSVSPWRADIYFNNTTGKYEILGLKYADLQFEKGTGTYKISQEKYNDIKKKEGVDSDSEFKFTLYKNDLLLVKETETKEQQLFRFLSRTMPKQKHYVELKPYDKQKFEGGEALIKVLGNVANGGQCIKGLGKSNISIYKVRTDVLGNQHIIKNEGDKPKLDF

SEQ ID NO: 781 - protein, 1121 aa, Streptococcus thermophilus
MSDLVLGLDIGIGSVGVGILNKVTGEIIHKNSRIFPAAQAENNLVRRTNRQGRRLTRRKKHRIVRLNRLFEESGLITDFTKISINLNPYQLRVKGLTDELSNEELFIALKNMVKHRGISYLDDASDDGNSSVGDYAQIVKENSKQLETKTPGQIQLERYQTYGQLRGDFTVEKDGKKHRLINVFPTSAYRSEALRILQTQQEFNPQITDEFINRYLEILTGKRKYYHGPGNEKSRTDYGRYRTSGETLDNIFGILIGKCTFYPDEFRAAKASYTAQEFNLLNDLNNLTVPTETKKLSKEQKNQIINYVKNEKAMGPAKLFKYIAKLLSCDVADIKEYRIDKSGKAEIHTFEAYRKMKTLETLDIEQMDRETLDKLAYVLTLNTEREGIQEALEHEFADGSFSQKQVDELVQFRKANSSIFGKGWHNFSVKLMMELIPELYETSEEQMTILTRLGKQKTTSSSNKTKYIDEKLLTEEIYNPVVAKSVRQAIKIVNAAIKEYGDFDNIVIEMARETNEDDEKKAIQKIQKANKDEKDAAMLKAANQYNGKAELPHSVFHGHKQLATKIRLWHQQGERCLYTGKTISIHDLINNSNQFEVDHILPLSITFDDSLANKVLVYATANQEKGQRTPYQALDSMDDAWSFRELKAFVRESKTLSNKKKEYLLTEEDISKFDVRKKFIERNLVDTRYASRVVLNALQEHFRAHKIDTKVSVVRGQFTSQLRRHWGIEKTRDTYHHHAVDALIIAASIQLNLWKKQKNTLVSYSEDQLLDIETGELISDDEYKESVFKAPYQHFVDTLKSKEFEDSILFSYQVDSKFNRKISDATIYATRQAKVGKDKADETYVLGKIKDIYTQDGYDAFMKIYKKDKSKFLMYRHDPQTFEKVIEPILENYPNKQINEKGKEVPVNPFLKYKEEHGYIRKYSKKGNGPEIKSLKYYDSKLGNHIDITPKDSNNKVVLQSVSPWRADVYFNKTTGKYEILGLKYADLQFEKGTGTYKISQEKYNDIKKKEGVDSDSEFKFTLYKNDLLLVKDTETKEQQLFRFLSRTMPKQKHYVELKPYDKQKFEGGEALIKVLGNVANSGQCKKGLGKSNISIYKVRTDVLGNQHIIKNEGDKPKLDF

SEQ ID NO: 782 - protein, 1121 aa, Streptococcus thermophilus
MSDLVLGLDIGIGSVGVGILNKVTGEIIHKNSRIFPAAQAENNLVRRTNRQGRRLTRRKKHRRVRLNRLFEESGLITDFTKISINLNPYQLRVKGLTDELSNEELFIALKNMVKHRGISYLDDASDDGNSSVGDYAQIVKENSKQLETKTPGQIQLERYQTYGQLRGDFTVEKDGKKHRLINVFPTSAYRSEALRILQTQQEFNPQITDEFVNRYLEILTGKRKYYHGPGNEKSRTDYGRYRTNGETLDNIFGILIGKCTFYPEEFRAAKASYTAQEFNLLNDLNNLTVPTETKKLSKEQKNQIINYVKNEKAMGPAKLFKYIAKLLSCDVADIKGYRIDKSGKAEIHTFEAYRKMKTLETLDIEQMDRETLDKLAYVLTLNTEREGIQEALEHEFADGSFSQKQVDELVQFRKANSSIFGKGWHNFSVKLMMELIPELYETSEEQMTILKRLGKQKTTSSSNKTKYIDEKLLTEEIYNPVVAKSIRQAIKIVNAAIKEYGDFDNIVIEMARETNEDDEKKAIQKIQKANKDEKDAAMLKAANQYNGKAELPHSVFHGHKQLATKIRLWHQQGERCLYTGKTISIHDLINNPNQFEVDHILPLSITFDDSLANKVLVYATANQEKGQRTPYQALDSMDDAWSFRELKAFVRESKTLSNKKKEYLLTEEDISKFDVRKKFIERNLVDTRYASRVVLNALQEHFRAHKIDTKVSVVRGQFTSQLRRHWGIEKTRDTYHHHAVDALIIAASSQLNLWKKQKNTLVSYSEDQLLDIETGELISDDEYKESVFKAPYQHFVDTLKSKEFEDSILFSYQVDSKFNRKISDATIYATRQAKVGKDKKDETYVLGKIKDIYTQDGYDAFMKIYKKDKSKFLMYRHDPQTFEKVIEPILENYPNKEMNEKGKEVPCNPFLKYKEEHGYIRKYSKKGNDPEIKSLKYYDSKLGNHIDITPKDSNNKVVLQSVSPWRADVYFNKTTGKYEILGLKYADLQFEKGTGTYKISQEKYNDIKKKEGVDSDSEFKFTLYKNDLLLVKDTETKEQQLFRFLSRTMPKQKHYVELKPYDKQKFEGGEALIKVLGNVANSGQCKKGLGKSNISIYKVRTDVLGNQHIIKNEGDKPKLDF

SEQ ID NO: 783 - protein, 1122 aa, Streptococcus thermophilus
MSDLVLGLDIGIGSVGVGILNKVTGEIIHKNSRIFPAAQAENNVERRTNRQGRRLTRRKKHRRVRLNRLFEESGLITDFTKISINLNPYQLRVRGLTDELSNEELFIALKNMVKHRGISYLDDASDDGNSSVGDYAQIVKENSKQLETKTPGQIQLERYQTYGQLRGDFTVEKDGKKHRLINVFPTSAYRSEALRILQTQQEFNSQITDEFINRYLEILTGKRKYYHGPGNEKSRTDYGRYRTSGETLDNIFGILIGKCTFYPEEFRAAKASYTAQEFNLLNDLNNLTVPTETKKLSKEQKNQIINYVKNEKAMGPAKLFKYIAKLLSCDVADIKGYRIDKSGKAEIHTFEAYRKMKTLETLDIEQMDRETLDKLAYVLTLNTEREGIQEALEHEFADGSFSQKQVDELVQFRKASSSIFGKGWHNFSVKLMMELIPELYETSEEQMTILTRLGKQKTTSSSNKTKYIDEKLLTEEIYNPVVAKSVRQAIKIVNAAIKEYGDFDNIVIEMARETNEDDEKKAIQKIQKANKDEKDAAMLKAANQYNGKAELPHSVFHGHKQLATKIRLWHQQGERCLYTGKTISIHDLINNPNQFEVDHILPLSITFDDSLANKVLVYATANQEKGQRTPYQALDSMDDAWSFRELKAFVRESKTLSNKKKEYLLTEEDISKFDVRKKFIERNLVDTRYASRVVLNALQEHFRAHKIDTKVSVVRGQFTSQLRRHWGIEKTRDTYHHHAVDALIIAASSQLNLWKKQKNTLVSYSEDQLLDIETGELISDDEYKESVFKAPYQHFVDTLKSKEFEDSILFSYQVDSKFNRKLSDATIYATRQAKVGKDKKDETYVLGKIKDIYTQDGYDAFMKIYKKDKSKFLMYRHDPQTFEKVIEPILENYPNKEMNEKGKEVPCNPFLKYKEEHGYIRKYSKKGNGPEIKSLKYYDSKLLGNPIDITPENSKNKVVLQSLKPWRADVYFNKTTGKYEILGLKYADLQFEKKTGTYKISQEKYNGIMKEEGVDSDSEFKFTLYKNDLLLVKDTETKEQQLFRFLSRTMPNVKYYVELKPYSKDKFEKNESLIEILGSADKSGRCIKGLGKSNISIYKVRTDVLGNQHIIKNEGDKPKLDF

SEQ ID NO: 784 - protein, 1388 aa, Streptococcus thermophilus
MTKPYSIGLDIGTNSVGWAVITDNYKVPSKKMKVLGNTSKKYIKKNLLGVLLFDSGITAEGRRLKRTARRRYTRRRNRILYLQEIFSTEMATLDDAFFQRLDDSFLVPDDKRDSKYPIFGNLVEEKAYHDEFPTIYHLRKYLADSTKKADLRLVYLALAHMIKYRGHFLIEGEFNSKNNDIQKNFQDFLDTYNAIFESDLSLENSKQLEEIVKDKISKLEKKDRILKLFPGEKNSGIFSEFLKLIVGNQADFRKCFNLDEKASLHFSKESYDEDLETLLGYIGDDYSDVFLKAKKLYDAILLSGFLTVTDNETEAPLSSAMIKRYNEHKEDLALLKEYIRNISLKTYNEVFKDDTKNGYAGYIDGKTNQEDFYVYLKNLLAEFEGADYFLEKIDREDFLRKQRTFDNGSIPYQIHLQEMRAILDKQAKFYPFLAKNKERIEKILTFRIPYYVGPLARGNSDFAWSIRKRNEKITPWNFEDVIDKESSAEAFINRMTSFDLYLPEEKVLPKHSLLYETFNVYNELTKVRFIAESMRDYQFLDSKQKKDIVRLYFKDKRKVTDKDIIEYLHAIYGYDGIELKGIEKQFNSSLSTYHDLLNIINDKEFLDDSSNEAIIEEIIHTLTIFEDREMIKQRLSKFENIFDKSVLKKLSRRHYTGWGKLSAKLINGIRDEKSGNTILDYLIDDGISNRNFMQLIHDDALSFKKKIQKAQIIGDEDKGNIKEVVKSLPGSPAIKKGILQSIKIVDELVKVMGGRKPESIVVEMARENQYTNQGKSNSQQRLKRLEKSLKELGSKILKENIPAKLSKIDNNALQNDRLYLYYLQNGKDMYTGDDLDIDRLSNYDIDHIIPQAFLKDNSIDNKVLVSSASNRGKSDDFPSLEVVKKRKTFWYQLLKSKLISQRKFDNLTKAERGGLLPEDKAGFIQRQLVETRQITKHVARLLDEKFNNKKDENNRAVRTVKIITLKSTLVSQFRKDFELYKVCEINDFHHAHDAYLNAVIASALLKKYPKLEPEFVYGDYPKYNSFRERKSATEKVYFYSNIMNIFKKSISLADGRVIERPLIEVNEETGESVWNKESDLATVRRVLSYPQVNVVKKVEEQNHGLDRGKPKGLFNANLSSKPKPNSNENLVGAKEYLDPKKYGGYAGISNSFAVLVKGTIEKGAKKKITNVLEFQGISILDRINYRKDKLNFLLEKGYKDIELIIELPKYSLFELSDGSRRMLASILSTNNKRGEIHKGNQIFLSQKFVKLLYHAKRISNTINENHRKYVENHKKEFEELFYYILEFNENYVGAKKNGKLLNSAFQSWQNHSIDELCSSFIGPTGSERKGLFELTSRGSAADFEFLGVKIPRYRDYTPSSLLKDATLIHQSVTGLYETRIDLAKLGEG

SEQ ID NO: 785 - protein, 1388 aa, Streptococcus thermophilus
MTKPYSIGLDIGTNSVGWAVITDNYKVPSKKMKVLGNTSKKYIKKNLLGVLLFDSGITAEGRRLKRTARRRYTRRRNRILYLQEIFSTEMATLDDAFFQRLDDSFLVPDDKRDSKYPIFGNLVEEKAYHDEFPTIYHLRKYLADSTKKADLRLVYLALAHMIKYRGHFLIEGEFNSKNNDIQKNFQDFLDTYNAIFESDLSLENSKQLEEIVKDKISKLEKKDRILKLFPGEKNSGIFSEFLKLIVGNQADFRKCFNLDEKASLHFSKESYDEDLETLLGYIGDDYSDVFLKAKKLYDAILLSGFLTVTDNETEAPLSSAMIKRYNEHKEDLALLKEYIRNISLKTYNEVFKDDTKNGYAGYIDGKTNQEDFYVYLKNLLAEFEGADYFLEKIDREDFLRKQRTFDNGSIPYQIHLQEMRAILDKQAKFYPFLAKNKERIEKILTFRIPYYVGPLARGNSDFAWSIRKRNEKITPWNFEDVIDKESSAEAFINRMTSFDLYLPEEKVLPKHSLLYETFNVYNELTKVRFIAESMRDYQFLDSKQKKDIVRLYFKDKRKVTDKDIIEYLHAIYGYDGIELKGIEKQFNSSLSTYHDLLNIINDKEFLDDSSNEAIIEEIIHTLTIFEDREMIKQRLSKFENIFDKSVLKKLSRRHYTGWGKLSAKLINGIRDEKSGNTILDYLIDDGISNRNFMQLIHDDALSFKKKIQKAQIIGDEDKGNIKEVVKSLPGSPAIKKGILQSIKIVDELVKVMGGRKPESIVVEMARENQYTNQGKSNSQQRLKRLEKSLKELGSKILKENIPAKLSKIDNNALQNDRLYLYYLQNGKDMYTGDDLDIDRLSNYDIDHIIPQAFLKDNSIDNKVLVSSASNRGKSDDFPSLEVVKKRKTFWYQLLKSKLISQRKFDNLTKAERGGLLPEDKAGFIQRQLVETRQITKHVARLLDEKFNNKKDENNRAVRTVKIITLKSTLVSQFRKDFELYKVREINDFHHAHDAYLNAVIASALLKKYPKLEPEFVYGDYPKYNSFRERKSATEKVYFYSNIMNIFKKSISLADGRVIERPLIEVNEETGESVWNKESDLATVRRVLSYPQVNVVKKVEEQNHGLDRGKPKGLFNANLSSKPKPNSNENLVGAKEYLDPKKYGGYAGISNSFAVLVKGTIEKGAKKKITNVLEFQGISILDRINYRKDKLNFLLEKGYKDIELIIELPKYSLFELSDGSRRMLASILSTNNKRGEIHKGNQIFLSQKFVKLLYHAKRISNTINENHRKYVENHKKEFEELFYYILEFNENYVGAKKNGKLLNSAFQSWQNHSIDELCSSFIGPTGSERKGLFELTSRGSAADFEFLGVKIPRYRDYTPSSLLKDATLIHQSVTGLYETRIDLAKLGEG

SEQ ID NO: 786 - protein, 595 aa, Streptococcus thermophilus
MVQFRKANSSIFGKGWHNFSVKLMMELIPELYETSEEQMTILKRLGKQKTTSSSNKTKYIDEKLLTEEIYNPVVAKSVRQAIKIVNAAIKEYGDFDNIVIEMARETNEDDEKKAIQKIQKANKDEKDAAMLKAANQYNGKAELPHSVFHGHKQLATKIRLWHQQGERCLYTGKTISIHDLINNPNQFEVDHILPLSITFDDSLANKVLVYATANQEKGQRTPYQALDSMDDAWSFRELKAFVRESKTLSNKKKEYLLTEEDISKFDVRKKFIERNLVDTRYASRVVLNALQEHFRAHKIDTKVSVVRGQFTSQLRRHWGIEKTRDTYHHHAVDALIIAASSQLNLWKKQKNTLVSYSEDQFLDIETGELISDDEYKESVFKAPYQHFVDTLKSKEFEDSILFSYQVDSKFNRKISDATIYATRKAKLDKEKKEYTYTLGKIKDIYTQAGYDAFIKIYKKDKSKFLMYHHDPQTFEKVIEPILENYPNKEINEKGKEVPCNPFLKYKEEHGYIRKYSKKGNGPEIKSFKYYDNLLGRHIDITPKNSKNIVALRKLNPWRTDVYFNHETMKYEFLGLKYADISYKKSKNKAGDFLPK

SEQ ID NO: 787 - protein, 1388 aa, Streptococcus thermophilus]
MTKPYSIGLDIGTNSVGWAVITDNYKVPSKKMKVLGNTSKKYIKKNLLGVLLFDSGITAEGRRLKRTARRRYTRRRNRILYLQEIFSTEMATLDDAFFQRLDDSFLVPDDKRDSKYPIFGNLVEEKVYHDEFPTIYHLRKYLADSTKKADLRLVYLALAHMIKYRGHFLIEGEFNSKNNDIQKNFQDFLDTYNAIFESDLSLENSKQLEEIVKDKISKLEKKDRILKLFPGEKNSGIFSEFLKLIVGNQADFRKCFNLDEKASLHFSKESYDEDLETLLGYIGDDYSDVFLKAKKLYDAILLSGFLTVTDNETEAPLSSAMIKRYNEHKEDLALLKEYIRNISLKTYNEVFKDDTKNGYAGYIDGKTNQEDFYVYLKNLLAEFEGADYFLEKIDREDFLRKQRTFDNGSIPYQIHLQEMRAILDKQAKFYPFLAKNKERIEKILTFRIPYYVGPLARGNSDFAWSIRKRNEKITPWNFEDVIDKESSAEAFINRMTSFDLYLPEEKVLPKHSLLYETFNVYNELTKVRFIAESMRDYQFLDSKQKKDIVRLYFKDKRKVTDKDIIEYLHAIYGYDGIELKGIEKQFNSSLSTYHDLLNIINDKEFLDDSSNEAIIEEIIHTLTIFEDREMIKQRLSKFENIFDKSVLKKLSRRHYTGWGKLSAKLINGIRDEKSGNTILDYLIDDGISNRNFMQLIHDDALSFKKKIQKAQIIGDEDKGNIKEVVKSLPGSPAIKKGILQSIKIVDELVKVMGGRKPESIVVEMARENQYTNQGKSNSQQRLKRLEKSLKELGSKILKENIPAKLSKIDNNALQNDRLYLYYLQNGKDMYTGDDLDIDRLSNYDIDHIIPQAFLKDNSIDNKVLVSSASNRGKSDDFPSLEVVKKRKTFWYQLLKSKLISQRKFDNLTKAERGGLLPEDKAGFIQRQLVETRQITKHVARLLDEKFNNKKDENNRAVRTVKIITLKSTLVSQFRKDFELYKVREINDFHHAHDAYLNAVIASALLKKYPKLEPEFVYGDYPKYNSFRERKSATEKVYFYSNIMNIFKKSISLADGRVIERPLIEVNEETGESVWNKESDLATVRRVLSYPQVNVVKKVEEQNHGLDRGKPKGLFNANLSSKPKPNSNENLVGAKEYLDPKKYGGYAGISNSFAVLVKGTIEKGAKKKITNVLEFQGISILDRINYRKDKLNFLLEKGYKDIELIIELPKYSLFELSDGSRRMLASILSTNNKRGEIHKGNQIFLSQKFVKLLYHAKRISNTINENHRKYVENHKKEFEELFYYILEFNENYVGAKKNGKLLNSAFQSWQNHSIDELCSSFIGPTGSERKGLFELTSRGSAADFEFLGVKIPRYRDYTPSSLLKDATLIHQSVTGLYETRIDLAKLGEG

SEQ ID NO: 788 - protein, 1038 aa, Streptococcus vestibularis
MIDELSNEELFIALKNMVKHRGISYLDDASDDGNSSVGDYAQIVKENSKQLETKTPGQIQLERYQKYGQLRGDFTVEEDGKKHRLINVFPTSAYRAEALRILQTQQEFNSQITDEFINRYLEILTGKRKYYHGPGNEKSRTDYGRYRTSGETLDNIFGILIGKCTFYPEEFRAAKASYTAQEFNLLNDLNNLTVPTETKKLSEEQKNQIINYVKNEKAMGPAKLFKYIAKLLSCDIADIKGYRIDKSDKAEIHTFEAYRKMKTLETIDIEKMSREELDKLAYVLTLNTEREGIQEALEHEFVDGNFSQEQIDELVQFRKANSSIFGKGWHNFSVKLMMELIPELYATSEEQMTILTRLGKQKTTSSSNKTKYIDEKLLTEEIYNPVVAKSVRQAIKIVNAAIKEYGDFDNIVIEMARATNEDDEKKAIQKIQKANKDEKDAAMLKAANQYNGKAELPHSVFHGHKQLATKIRLWHQQGERCLYTGKTISIHDLINNPNQFEIDHILPLSITFDDSLANKVLVYATANQEKGQRTPYQALDSMDDAWSFRELKAFVRESKTLSNKKKEYLLTEEDISKFDVRKKFIERNLVDTRYASRVVLNALQEHFRAHKIDTKVSVVRGQFTSQLRRHWGIEKTRDTYHHHAVDALIIAASSQLNLWKKQKNTLVNYSENQLLDIETGELISDDEYKESVFKAPYQHFVDTLKSKEFEDSILFSYQVDSKFNRKISDATIYATRKAKLDKEKKEYTYTLGKIKDIYALGTKTPSKTGFYKFLDLYKKNKSQFLMYQKDRKTWDEVIEKILEQYRPFKEKDKNGKEVDFNPFEKYRIENGPIRKYSRKGNGPEIKSLKYYDNLLGRFVDITPSESKNPVALLSLNPWRTDVYYNTETRKYEFLGLKYADLCFEKGGSYGISKVKYNKIREKEGIGKNSEFKFTLYKNDLILIKDTETNRQQVFRFWSRTGKDNPKRFEKHKIELKPYEKARFEKGEELEVLGKVPPSSNQLQKNMQIENLSIFKVRTDVLGNQHIIKNEGDKPKLDF

SEQ ID NO: 789 - protein, 97 aa, Streptococcus vestibularis
MSDLVLGLDIGIGSVGVGILNKVTGEIIHKNSRIFPAAQAENNVERRTNRQGRRLTRRKKHRRVRLNHLFEESGLITDFTKVSINLNPYQLRVKIDR

SEQ ID NO: 790 - protein, 1084 aa, Subdoligranulum sp.
MKNTLYGIGLDIGVASVGWAVVGLNGTGEPVGLHRLGVRIFDKAEQPKTGESLAAPRRMARGMRRRLRRKALRRADVYALLERSGLSTREELAQMFEAGGLEDIYALRTRALDEPVGKAEFSRILLHLAQRRGFKSNRRTASDGEDGRLLAAVNENRRRMAQGGWRTVGEMLYRHEAFALHKRNKADDYLSTVGRDMVAEEASILFERQRAMGCSWAAPELQAEYLSILLRQRSFDEGPGGNSPYGGNQVEKMVGRCTFEPDEPRAAKAAYSFEYFSLLQKLNHIRLAENGETRPLTQPQRQQLLSLAHKTPDISLARIRKELALPETVQFNGVRCRANETLEESEKKEKFACLPAYHKMRKALDGVVKGRISSLSISQRDAAATALSLYKNEDTLRAKLTEAGFQAPEIDALAGLTGFSKFGHLSLKACRKLIPHLEQGLTYDQACTAAGYDFKGHGAGERAFTLPAAAPEMEQITSPVVRRAVAQTIKVVNGIIREMDASPAWVRIELARELSKTFGERQEMDRSMRENAAQNERLMQELRDTFHLLSPTGQDLVKYRLWKEQDGVCAYSLRRLDVERLFEPGYVDVDHIVPYSLSFDDRRSNKVLVLSSENRQKGNRLPLQYLQGKRREDFIVWTNSSVHDYRKRQNLLREKLSGDEAEGFRQRNLQDTQHMARFLYNYISDHLAFAQSEALGKKRVFAVSGAVTSHLRKRWGLSKVRADGDLHHALDAAVVACTTDGMIRRISGYYGHIEGEYLQDADGAGSQHARTKERFPAPWPRFRDELIVRLSEQPAEPLLDINPEFYCEYGTEHIRPVFVSRMPRRKVTGPGHKETIKGAAAADEGLLTVRKALTELKLDKDGEIKDYYMPSSDTLLYEALKAQLRRFGGDGKKAFAEPFYKPKADGTPGPLVRKVKTTEKATLTVPVHGGAASNDTMVRVDVFLVPGDGYYWVPVYTADTLKPELPNRAVVQGKPYSEWKEMREEDFIFSLYPNDLVYVEHKSGLKFTLQNADSTLEKTRTQTSAFAYFVSGSISTASITIRTHDNAYGIPSLGVKTLKTFHKYQVDVLGNVFPVHKETRQKFR

SEQ ID NO: 791 - protein, 951 aa, Sutterella parvirubra
MPTVRPVFHSSASFDLGAKNTGLFLVNHPAGAAPSAEYAAAYTIVQPADGDGLNYSTTNRRAVRHRLRGGKRFKLARRLVLQVIDALRKLKPGLIRDEEMRRTVEALSSLLKRRGFTRIESEAQVDPTTLDSVDPAVFADHETLGGFFSLGIPISTQWDALSQNPGAVEQLFKALPSAKDFGKYVTEQFPEFAEQKKLYADAIKVLSSEAKSIVMQLGLGHHHRSKYFEMIAHDMLRDPRLQGVFELFGSEERFKTFICNVSNLQLRALRWYFDEPNPEVANQWNPEKFQVVWLRGLKYFHPDAERKADMKKLIDELTASKDILDALCTTDPRRTIPPYEDQNNRRPPFDQTLWLSAAELTRRYGDKWRIWSQKFERADRALSTGLDEILLYTDRRSRMFNRNQDPSVYADSYVLQRVLDRSSKLDRYALRALAAGYRTQELHEPLATLSDTLGTQHVETFLTFAAEYYEEVAAAKNGLWLDGPSRLLERADIHPPMKKKVLDLLLGNILDATPEIGRILRTVLWNRHVHEKSRSTPASLCRSIEAIRKDFGGEFRMRYDALDAKIRAAEDQKKKFKPTNAEEKDLFKAWNATKTMHAFLRDVLQLTPKQLERTASPYVFAQLHTLIDTERDGFTSTSLAAHLENHWRMRANAAGMAQCSRLPADAVRPFDGVLSKALDRQAFEAAKLAAQHLMSRKELTDTDIRYSIIIESNRFAFSASTAELKKNTLAKKNAEKGLNFELKRWQDKDSRIREASRGICAYTGAKLGDVVEYDHIIPRAFTTSAMGSVFNSEANLICVSRPGNQTKADKRYGLNKLHKTYLTAVFGTADVTTIAASIEDIVGKLASANRLRHFELLNEKEQDAVRHALFLDDESDARRIVLRELAAQNKSRVNGTQAWFVRAFMTKLLEITKDWRERTGNTLDIRSWKTDAEVASRLRSALNFHAEITLT

SEQ ID NO: 792 - protein, 406 aa, Sutterella parvirubra
SNLFREEVPYGDHFLPIIQMKNRIYIGYQLPKADGTGGNAVAVLGKDPLELLETLKPFLDREPQAFSDHPVTYKMINERAYELLTKCALTPDQTTELERTQAEVLRSLNYQTSRAAVLGRLVDDKNKFVAKDAVWKEKDFVISFKLSPKKSAFKASGQLELPAKSDWKALVDSPELAINWGQPADDTFSQRIERKVRMNSSHLEHTPKKRVVSLPVVDKPSGGFRIRRHNLDGSAVFQVHTVANNKYGGFSADSAGKVDWSTPVLCGHLQHANLVPLDPETASAEQLVRMSEWRVVETTSDIRLEVCPGTSGRRYVRVELPFTLLQEWLTAGKVADVPVSPLHLPGSIKLTDPKTFCAEAQKTLSIFAQPRATIFFEQLGDRVRFRFEASGGPATMNAAYNAAGRS

SEQ ID NO: 793 - protein, 389 aa, Sutterella wadsworthensis
MKACDLEEKTNHLQACVAIDLGARYTGTFSILHKSSHLPSKDDCRAATYVLPEDGGKMTYSQRNRTAVRHRIRGKKRFALARRMAMLIIREKLAAKSVTLTSSETRRLAEAVGSLLRRRGYNRLETETDNDLTVLENIEPEVFSEHEILGKYFYAGTDLAIQWETLSQDLSKISSLLAERLSEKDFKKYLTGLIPDDKNKIKHIISVFKMLIDEAESINMQCVLGHKHRTQYLSDIHADMHRDTRLSKAAEAFGGVDRLWRLLGNLSNLQLRAHRWYFNAPHLFDDQALEPARLQKTLVRAFKYLHCPQGVESRAQAELVKELEEADDIIDALCTIDPVRTIPPYENQQNRRPPFDQTLYLSPDLGVSGFLCLGRLFQGQPNEAALCFL

SEQ ID NO: 794 - protein, 976 aa, Tannerella sp.
MKKILGLDLGSNSIGWALVNEAENRDEASSIIKLGVRVNPLTVDEMQNFEKGKSITTNADRTLKRSMRRNLQRYKLRRDALIKLLKKVGFITDGTILSEQGNRTTFETYRLRAKAPDEEISLQELARVLLMINKKRGYKSSRKIKEKEAGTLIDGMEVAKKLYDEDLTPGQLCLQLLESGKKSLPDFYSSDLQEEFDRIWNFQKQFNPKAFCDTAKEEIKGKNKSQTWAILAKYFIWMEEMDVWNEKESKTERVEKECKLVGLKRTVKKEEQRKENYCWRVQALTEQLDLEKVAVVLQEINGQISTSSGYLGAISDRSKVLYFNRQTVGQYQMAELEKNPNTSLRNMVFYRQDYLDEFDKIWEKQAEFHKELTVELKKEIRDIIIFYQRRLKSQKGLIGFCEFENREIMVEKNGKMQAKVVGCKVIPRSHPLFQEFKIWQTLNNVEVFAGEKKCKRKRTDAFPGLFDGTEDTLMVEGWRYLYQEEKEILAKELSVKKSLKKEYILKLLFDNPQDLDMNFEQIEGNDTGNVLFSAYSKMIEKYGYEPLDFGKPTDKIIEQLQVIFADLGWNTDLLFVDLNKEGKDLEKQPYFKLWHLLYSFEGDNTPTGNGKLVEKLMELCHVGKECALELVNISFQNDYGSLSAKAIKKILPYLKEGNRYDVACGYAGYRHSKSSLTKEEIENKVLKDKLDILPKNSLRNPVVEKILNQMVNVINAIIDTYGKPDEIRVELARELKKSAKEREELTKAIAKSTREHEEIRKVLQEEFGMINVSRNDIIRYKLYKELKDNGYKTLYSNQDIPKEKVFSKEIDIEHIIPQARLFDDSLSNKTLEYKAINIEKGNKTAYDFVKEKYGEKGLQQYLNRCESLFKGHRTKLRKLKMGQENIPEGFIDRDLRNTQYIAKKALAMLNEICRRVVATTGSITDRLREDWQLVDVLKELRCFRYFKDTKMKANHNKNIFYTSIKVDVSDTSKILK

SEQ ID NO: 795 - protein, 1049 aa, Tistrella mobilis
MINERLTFGIDLGIGSCGWAVLRHADAAGEPGVIEGLGSWCFDVPETSKERIPTNQVRRSNRLLRRVIRRRRNRMAEIRRLFHAQGLLPSADEDALKRPRLDPWELRARGLDQCLSAEEFAVALGHIARHRGFRSSAKRKAANTSGEDSKMLSALLVTRERTARYRTVGEMFARDPEYSARRRNRDGIFDRTVARDDLIHEVGKLFEAQRARGSAFASPDLEADFNAIAFRQAEMQDSERLVGNCPFERDEKRAARWAPSFERFRLLTRLINLRIATAEGERRFTPEDLARVSAELGATAKLPVSRVRALIGLLPDERFTTIRVEDEDRDIVARTGEAAPGTWRLRKTLGEALWAEMQARPDQLDAIAHVLSFFEATAKIRSELDRLGLPAAVIEALDRGLEDGAFAKFKGAGHISAKACRNLLPHLQQGHRYDQACRLAGYDHAASTLSHTAQVVSKAGFNALVTELGESIANPIARKALTEGLKQIRAMCARWGLPGAIHIELAREVGNSIEKRRELESQRETTTKRRQTERDEIRGLLALEDVDDDTLLRYRLWKEQGGKCLYTGKDIHVRQLIATDNSVQVDHILPWSRFGDDSFNNKTLCLASANQRKRGQTPWEWFSLTGTPEAWEVFASRVETSKDLRGFKKRNLLLKNADEVAQRFRSRNLNDTRYAARLLAEAAKLFYPAGDRQEKDGRRRVLTRPGPLTAALRHAWGLESLKKADGKRVSDDRHHALDALAVAAISEREVQRLTRSFQEWEQQGLARPLRHVAPPWPGFRGDVLAAYAQAFVARPERRRARGKGHDASIRQVVGEGPEAQVFERRGLADLKEADLDRVKDPERNQAIIEAVRAWILAGRPADAPPRSPRGDVIVKLRTAPAKKIKPAVPVRGGTADRGDMVRIDVFTRPNRKGRDEWYLVPIYPHQVMNRKAWPHPPMRSVVAYKDEAGWTEIGAEHSFRFSLYPRSYVQLVKSNGDVIEGYLVSMDRSTGAFRVFVHNNPAEMAKGIGAKTLLNLRKFNVDRFGVRTEVKSEVRTWHGEVCTSPVPPD

SEQ ID NO: 796 - protein, 1395 aa, Treponema denticola
MKKEIKDYFLGLDVGTGSVGWAVTDTDYKLLKANRKDLWGMRCFETAETAEVRRLHRGARRRIERRKKRIKLLQELFSQEIAKIDEGFFQRMKESPFYAEDKTILQENALFNDKDFTDKTYHKAYPTINHLIKAWIENKVKPDPRLLYLACHNIIKKRGHFLFEGDFDSENQFDTSIQALFEYLREDMEVDIDADSQKVKEILKDSSLKNSEKQSRLNKILGLKPSDKQKKAITNLISGNKINFADLYDNPDLKDAEKNSISFSKDDFDALSDDLASILGDSFELLLKAKAVYNCSVLSKVIGDEQYLSFAKVKIYEKHKTDLTKLKAVIKKHFPNNYKKVFGYNQDNESKNNYSGYVGVCKTKNKKLVINNSVNQEDFYKFLKPILSAKSEIKEVNDILAEIETGNFLPKQISKSNAEIPYQLRKMELEKILSNAEKHFSFLKQKDEKGLSHSEKIIMLLTFKIPYYIGPINDNHKKSFPDRCWVVKKEKSPSGKTTPWNFFDHIDKEKTAEEFITSRTNFCTYLIGESVLPKNSLLYSEYTVLNEINNLQIIIDGKNICDTKLKQKIYEDLFKKYKKITQKQISTFIKHEGICNKTDEVIILGIDKECTSSLKSYIELKNIFGKQVDEISTKNMLEEIIRWATIYDEGEGKTILKTKIKAEYGKYCSDEQIKKILNLKFSGWGRLSRKFLETVTSEMPGFSEPVNIITAMRETQNNLMELLSSEFKFTENIKKINSGFEDAEKQFSYDGLVKPLFLSPSVKKMLWQTLKLVKEISHITQAPPKKIFIEMAKGAELEPARTKTRLKILQDLYSSCKNDADAFSSEIQYLSGKIENEDNLRLRSDKLYLYYTQLGKCMYCGKPIEIGHVFDTSNYDIDHIYPQSKIKDDSISNRVLVCSSCNKNKEDKYPLKSEIQSKQRGFWNFLQRNNFISLEKLNRLTRTTPISDDETAKFIARQLVETRQATKVAAKVLEKMFPETKIVYSKAETVSMFRNKFDIIKCREINDFHHAHDAYLNIVVGNVYNTKFTNNPWNFIKEKRDNPKIADTYNYYKVFDYDVKRNNITAWEKGKTIITVKDMLKRNTPIYTRQAACKKGGLFDQTIMKKGLGQHPLKKEGPFSNISKYGGYNKVSAAYYTLIEYEEKGNKIRSLETIPLYLVKDIQKDQDVLKSYLTDLLGKKEFKILVPKIKINSLLKINGFPCHITGKTNDSFLLRPAVQFCCSNDEVLYFKKIIRFSEIRSQREKIGKTISPYEDLSFRSYIKENLCKKTKNDEIGEKEFYDLLQKKNLEIYDMLLTKHKDTIYKKRPNSATIDILVKGKEKFKSLIIENQFEVILEILKLFSATRNVSELQHIGGSKYSGVAKIGNKISSLDNCILIYQSITGIFEKRIDLLKV

SEQ ID NO: 797 - protein, 769 aa, Treponema denticola
MKKEIKDYFLGLDVGTGSVGWAVTDTDYKLLKANRKDLWGMRCFETAETAEVRRLHRGARRRIERRKKRIKLLQELFSQEIAKIDEGFFQRMKESPFYAEDKTILQENALFNDKDFTDKTYHKAYPTINHLIKAWIENKVKPDPRLLYLACHNIIKKRGHFLFEGDFDSENQFDTSIQALFEYLREDMEVDIDADSQKVKEILKDSSLKNSEKQSRLNKILGLKPSDKQKKAITNLISGNKINFADLYDNPDLKDAEKNSISFSKDDFDALSDDLASILGDSFELLLKAKAVYNCSVLSKVIGDEQYLSFAKVKIYEKHKTDLTKLKAVIKKHFPNNYKKVFGYNQDNESKNNYSGYVGVCKTKNKKLVINNSVNQEDFYKFLKPILSAKSEIKEVNDILAEIETGNFLPKQISKSNAEIPYQLRKMELEKILSNAEKHFSFLKQKDEKGLSHSEKIIMLLTFKIPYYIGPINDNHKKSFPDRCWVVKKEKSPSGKTTPWNFFDHIDKEKTAEEFITSRTNFCTYLIGESVLPKNSLLYSEYTVLNEINNLQIIIDGKNICDTKLKQKIYEDLFKKYKKITQKQISTFIKHEGICNKTDEVIILGIDKECTSSLKSYIELKNIFGKQVDEISTKNMLEEIIRWATIYDEGEGKTILKTKIKAEYGKYCSDEQIKKILNLKFSGWGRLSRKFLETVTSEMPGFSEPVNIITAMRETQNNLMELLSSEFKFTENIKKINSGFEDAEKQFSYDGLVKPLFLSPSVKKCCGRL

SEQ ID NO: 798 - protein, 1395 aa, Treponema denticola
MKKEIKDYFLGLDVGTGSVGWAVTDTDYKLLKANRKDLWGMRCFETAETAEVRRLHRGARRRIERRKKRIKLLQELFSQEIAKIDEGFFQRMKESPFYAEDKTILQENALFNDKDFTDKTYHKAYPTINHLIKAWIENKVKPDPRLLYLACHNIIKKRGHFLFEGDFDSENQFDTSIQALFEYLREDMEVDIDADSQKVKEILKDSSLKNSEKQSRLNKILGLKPSDKQKKAITNLISGNKINFADLYDNPDLKDAEKNSISFSKDDFDALSDDLASILGDSFELLLKAKAVYNCSVLSKVIGDEQYLSFAKVKIYEKHKTDLTKLKAVIKKHFPNNYKKVFGYNQDNESKNNYSGYVGVCKTKNKKLVINNSVNQEDFYKFLKPILSAKSEIKEVNDILAEIETGNFLPKQISKSNAEIPYQLRKMELEKILSNAEKHFSFLKQKDEKGLSHSEKIIMLLTFKIPYYIGPINDNHKKSFPDRCWVVKKEKSPSGKTTPWNFFDHIDKEKTAEEFITSRTNFCTYLIGESVLPKNSLLYSEYTVLNEINNLQIIIDGKNICDTKLKQKIYEDLFKKYKKITQKQISTFIKHEGICNKTDEVIILGIDKECTSSLKSYIELKNIFGKQVDEISTKNMLEEIIRWATIYDEGEGKTILKTKIKAEYGKYCSDEQIKKILNLKFSGWGRLSRKFLETVTSEMPGFSEPVNIITAMRETQNNLMELLSSEFKFTENIKKINSGFEDAEKQFSYDGLVKPLFLSPSVKKMLWQTLKLVKEISHITQAPPKKIFIEMAKGAELEPARTKTRLKILQDLYSSCKNDADAFSSEIQYLSGKIENEDNLRLRSDKLYLYYTQLGKCMYCGKPIEIGHVFDTSNYDIDHIYPQSKIKDDSISNRVLVCSSCNKNKEDKYPLKSEIQSKQRGFWNFLQRNNFISLEKLNRLTRTTPISDDETAKFIARQLVETRQATKVAAKVLEKMFPETKIVYSKAETVSMFRNKFDIIKCREINDFHHAHDAYLNIVVGNVYNTKFTNNPWNFIKEKRDNPKIADTYNYYKVFDYDVKRNNITAWEKGKTIITVKDMLKRNTPIYTRQAACKKGELFNQTIMKKGLGQHPLKKEGPFSNISKYGGYNKVSAAYYTLIEYEEKVNKIRSLETIPLYLVKDIQKDQDVLKSYLTDLLGKKEIKILVPKIKINSLLKINGFPCHITGKTGDSFVLRPAVQFCCSNDEVLYFKKIIRFNEIRSQREKMGKTISPYEDLSFRSYIKENLCKKTKADEIGEKEFYDLLQKKNLEIYDMLLTKHKDTIYNKRPNSTTLGMLTKGRYEFINLKPKDQIIVMLEILKLFCTTREAIDLGLIKGKPAAGVATLGKKISNLDNCILIYQSITGIFEKRIDLLKV

SEQ ID NO: 799 - protein, 1395 aa, Treponema denticola
MKKEIKDYFLGLDVGTGSVGWAVTDTDYKLLKANRKDLWGMRCFETAETAEVRRLHRGARRRIERRKKRIKLLQELFSQEIAKIDEGFFQRMKESPFYAEDKTILQENTLFNDKDFTDKTYHKAYPTINHLIKAWIENKVKPDPRLLYLACHNIIKKRGHFLFEGDFDSENQFDTSIQALFEYLREDMEVDIDADSQKVKEILKDSSLKNSEKQSRLNKILGLKPSDKQKKAITNLISGNKINFADLYDNPDLKDAEKNSISFSKDDFDALSDDLASILGDSFELLLKAKAVYNCSVLSKVIGDEQYLSFAKVKIYEKHKTDLTKLKNVIKKHFPKDYKKVFGYNKNEKNNNNYSGYVGVCKTKSKKLIINNSVNQEDFYKFLKTILSAKSEIKEVNDILTEIETGTFLPKQISKSNAEIPYQLRKMELEKILSNAEKHFSFLKQKDEKGLSHSEKIIMLLTFKIPYYIGPINDNHKKSFPDRCWVIKKEKSPSGKTTPWNFFDHIDKDKTAEAFITSRTNFCTYLVGESVLPKSSLLYSEYTVLNEINNLQIIIDGKNICDIKLKQKIYEELFKKYKKITQKQISTFIKHEGICNKTDEVIILGIDKECTSSLKSYIELKNIFGKQVDEISTKNMLEEIIRWATIYDEGEGKTILKTKIKAEYGKYCSDEQIKKILNLKFSGWGRLSRKFLETVTSEMPGFSEPVNIITAMRETQNNLMELLSSEFKFTENIKKINSGFEDAEKQFSYNGLVKPLFLSPSVKKMLWQTLKLVKEISHITQAPPKKIFIEMAKGAELEPARTKTRLKILQDLYNNCKNDADAFSSEIKDLSGKIENEDNLRLRSDKLYLYYTQLGKCMYCGKPIEIGHVFDTSNYDIDHIYPQSKIKDDSISNRVLVCSSCNKNKEDKYPLKSEIQSKQRGFWNFLQRNNFISLEKLNRLTRTTPISDDETAKFIARQLVETRQATKVAAKVLEKMFPETKIVYSKAETVSMFRNKFDIIKCREINDFHHAHDAYLNIVVGNVYNTKFTNNPWNFIKEKRDNPKIADTYNYYKVFDYDVKRNNITAWEKGKTIITVKDMLKRNTPIYTRQAACKKGGLFDQTIMKKGLGQHPLKKEGAFSNISKYGGYNKVSAAYYTLIEYEEKGNKIRSLETIPLYLVKDIQKDQDVLKSYLTDLLGKKEIKILVPKIKINSLLKINGFPCHITGKTGDSFVLRPAVQFCCSNDEVLYFKKIIRFNEIRSQREKMGKTISPYEDLSFRSYIKENLCKKTKADEIGEKEFYDLLQKKNLEIYDMLLTKHKDTIYNKRPNSTTLGMLTKGRYEFINLKPKDQIIVMLEILKLFCTTREAIDLGLIKGKPAAGVATLGKKISNPDNCILIYQSITGIFEKRIDLLKV

SEQ ID NO: 800 - protein, 1395 aa, Treponema denticola
MKKEIKDYFLGLDVGTGSVGWAVTDTDYKLLKANRKDLWGMRCFETAETAEVRRLHRGARRRIERRKKRIKLLQELFSQEIAKIDEGFFQRMKESPLYAEDKTILQENTLFNDKDFTDKTYHKAYPTINHLIKAWIENKVKPDPRLLYLACHNIIKKRGHFLFEGDFDSENQFDTSIQALFEYLREDMELDIDADSQKVKEILKDSSLKNSEKQSRLNKMLGLKPSDKQKKAITNLISGNKINFADLYDNPDLKDAEKNSISFSKDDFDALSDDLASILGDSFELLLKAKAVYNCSVLSKVIGDEQYLSFAKVKIYEKHKTDLTKLKNVIKKHFPKDYKKVFGYNKNEKNNNNYSAYVGVCKITHKKLVIKNSASQEDFYKFLKTILSAKSEIKEVNDILTEIETGTFLPKQISKSNAEIPYQLRKMELEKILSNAEKHFSFLKQKDEKGLSHSEKIIMLLTFKIPYYIGPINDNHKKSFPDRCWVVKKEKSPSGKTTPWNFFDHIDKEKTAEEFITSRTNFCTYLIGESVLPKSSLLYSEYTVLNEINNLQIIIDGKNICDIKLKQKIYEELFKKYKKITQKQISTFIKHEGICNKTDEVIILGIDKECTSSLKSYIELKNIFGKQVDEISTKNMLEEIIRWATIYDEGEGKTILKTKIKAEYGKYCSDEQIKKILNLKFSGWGRLSRKFLETVTSEMPGFSEPVNIITAMRETQNNLMELLSSEFKFTENIKKINSGFEDAEKQFSYNGLVKPLFLSPSVKKMLWQTLKLVKEISHITQAPPKKIFIEMAKGAELEPARTKTRLKILQDLYSSCKNDADAFSSEIQYLSGKIENEDNLRLRSDKLYLYYTQLGKCMYCGKPIEIGHVFDTSNYDIDHIYPQSKIKDDSISNRVLVCSSCNKNKEDKYPLKAEIQSKQRGFWNFLQRNNFISLEKLNRLTRTSPISDDETAKFIARQLVETRQATKVAAKVLEKMFPETKIVYSKAETVSMFRNKFDIIKCREINDFHHAHDAYLNIVVGNVYNTKFTNNPWNFIKEKRDNPKIADTYNYYKVFDYDVKRNNITAWEKGKTIITVKDMLKRNTPIYTRQAACKKGELFNQTIMKKGLGQHPLKKEGPLSNISKYGGYNKVSAAYYTLIEYEEKGSKIRSLETIPLYLVKDIQKNKDGLKSYLTDQIGKKEIKILIPKIKINSLLKINGFPCHITGKMGEAFVLRPAVQFCCSNDEALYFKKIIRFNEIRKQREKMGKTISPYEDLSFRSYIKDNLCKKTKADEIEEKEFYDLLQKKNLEIYDMLLTKHKDTIYKKRPNSATIDILVKGKEKFKSLIIENQFEVILEILKLFSATRNVSDLQHIGGSKNAGNARVGNKISSLDNCILIYQSITGIFEKRIDLLKI

SEQ ID NO: 801 - protein, 1395 aa, Treponema denticola
MKKEIKDYFLGLDVGTGSVGWAVTDTDYKLLKANRKDLWGMRCFETAETAEVRRLHRGARRRIERRKKRIKLLQELFSQEIAKIDEGFFQRMKESPLYAEDKTILQENTLFNDKDFTDKTYHKAYPTINHLIKAWIENKVKPDPRLLYLACHNIIKKRGHFLFEGDFDSENQFDTSIQALFEYLREDMEVDIDADSQKVKEILKDSSLKNSEKQSRLNKMLGLKPSDKQKKAITNLISGNKINFADLYDNPDLKDAEKNSISFSKDDFDALSDDLASILGDSFELLLKAKAVYNCSVLSKVIGDEQYLSFAKVKIYEKHKTDLTKLKNVIKKHFPKDYKKVFGYNKNEKNNNNYSGYVGVCKTKSKKLIINNSVNQEDFYKFLKTILSAKSEIKEVNDILTEIETGTFLPKQISKSNAEIPYQLRKMELEKILSNAEKHFSFLKQKDEKGLSHSEKIIMLLTFKIPYYIGPINDNHKKSFPDRCWVVKKEKSPSGKTTPWNFFDHIDKEKTAEEFITSRTNFCTYLIGESVLPKNSLLYSEYTVLNEINNLQIIIDGKNICDTKLKQKIYEELFKKYKKITQKQISTFIKHEGICNKTDEVIILGIDKECTSSLKSYIELKNIFGKQVDEISTKNMLEEIIRWATIYDEGEGKTILKTKIKAEYGKYCSDEQIKKILNLKFSGWGRLSRKFLETVTSEMPGFSEPVNIITAMRETQNNLMELLSSEFKFTENIKKINSGFEDVEKQFSYDGLVKPLFLSPSVKKMLWQTLKLVKEISHITQAPPKKIFIEMAKGAELDPVRTKTRLKILQDLYNNCKNDADAFSSEIKDLSGKIENEDNLRLRSDKLYLYYTQLGKCMYCGKPIEIGHVFDTSNYDIDHIYPQSKIKDDSISNRVLVCSSCNKNKEDKYPLKAEIQSKQRGFWNFLQRNNFISLEKFNRLTRATPISDDETAKFIARQLVETRQATKVAARVLEKMFPETKIVYSKAETVSMFRNKFDIVKCREINDFHHAHDAYLNIVVGNVYNTKFTNNLWNFIKEKRDNPKIADTYNYYKVFDYDVKRNNITAWEKGKTIITVKDMLKRNTPIYTRQAACKKGGLFDQTIMKKGLGQHPLKKEGPFSNISKYGGYNKVSAAYYTLIEYEEKGNKIRSLETIPLYLVKDIQKDQDVLKSYLTDLLGKKEFKILVPKIKINSLLKINGFPCHITGKTNDSFLLRPAVQFCCSNDEVLYFKKIIRFSEIRSQREKIGKTISPYEDLSFRSYIKENLCKKTKNDEIGEKEFYDLLQKKNLEIYDMLLTKHKDTIYKKRPNSATIDILVKGKEKFKSLIIENQFEVILEILKLFSATRNVSDLQHIGGSKYSGVAKIGNKISSLDNCILIYQSITGIFEKRIDLLKV

SEQ ID NO: 802 - protein, 357 aa, Treponema denticola
MKKEIKDYFLGLDVGTGSVGWAVTDTDYKLLKANRKDLWGMRCFETAETAEVRRLHRGARRRIERRKKRIKLLQELFSQEIAKTDEGFFQRMKESPFYAEDKTILQENALFNDRDFTDKTYHKAYPTINHLIKAWIENKVKPDPRLLYLACHNIIKKRGHFLFEGDFDSENQFDTSIQAFFEYLREDMEVDIDADSQKIKEILKDSSLKNSEKQSRLNKILGLKSSDKQKKAITNLISGNKINFADLYDNPDLKDAEKNSISFSKDDFDALSDDLASILGDSFELLLKAKAVYNCSVLSKVIGDEQYLSFAKVKIYEKHKTDLTKLKNVIKKHFPKDYKKVFGYNKNEKITTITPDM

SEQ ID NO: 803 - protein, 1395 aa, Treponema denticola
MKKEIKDYFLGLDVGTGSVGWAVTDTDYKLLKANRKDLWGMRCFETAETAEVRRLHRGARRRIERRKKRIKLLQELFSQEIAKTDEGFFQRMKESPFYAEDKTILQENALFNDRDFTDKTYHKAYPTINHLIKAWIENKVKPDPRLLYLACHNIIKKRGHFLFEGDFDSENQFDTSIQALFEYLREDMEVDIDADSQKVKEILKDSSLKNSEKQSRLNKMLGLKPSDKQKKAITNLISGNKINFADLYDNPDLKDAEKNSISFSKDDFDALSDDLASILGDSFELLLKAKAVYNCSVLSKVIGDEQYLSFAKVKIYEKHKTDLTKLKNVIKKHFPNDYKKVFGYNKNEKNNNNYSAYVGVCKTKSKKLVINNTVNQEDFYKFLKPILLAKSEIKEVNDILTEIETGTFLPKQISKSNAEIPYQLRKMELEKILSNAEKHFSFLKQKDEKGLSHSEKIIMLLTFKIPYYIGPINDNHKKSFPDRCWVIKKEKSPSGKTTPWNFFDHIDKDKTAEAFITSRTNFCTYLVGESVLPKNSLLYSEYTVLNEINNLQIIIDGKNICDIKLKQKIYEELFKKYKKITQKQISTFIKHEGICNKTDEVIILGIDKECTSSLKSYIELKNIFGKQVDEISTKNMLEEIIRWATIYDEGEGKTILKTKIKAEYGKYCSDEQIKKILNLKFSGWGRLSRKFLETVTSEMPGFSEPVNIITAMRETQNNLMELLSSEFKFTENIKKINSGFEDVEKQFSYDSLVKPLFLSPSVKKMLWQTLKLVKEISHITQAPPKKIFIEMAKGAELDPVRTKTRLKILQDLYNNCKNDADAFSSEIKDLSGKIENEDNLRLRSDKLYLYYTQLGKCMYCGKPIEIGHVFDTSNYDIDHIYPQSKIKDDSISNRVLVCSSCNKNKEDKYPLKAEIQSKQRGFWNFLQRNNFISLEKLNRLTRTSPISDDETAKFIARQLVETRQATKVAAKVLEKMFPETKIVYSKAETVSMFRNKFDIIKCREINDFHHAHDAYLNIVVGNVYNTKFTNNPWNFIKEKRDNPKIADTYNYYKVFDYDVKRNNITAWEKGKTIITVKDMLKRNTPIYTRQAACKKGELFNQTIMKKGLGQHPLKKEGPLSNISKYGGYNKVSAAYYTLIEYEEKGSKIRSLETIPLYLVKDIQKNKDGLKSYLTDQIGKKEIKILIPKIKINSLLKINGFPCHITGKMGEAFVLRPAVQFCCSNDEALYFKKIIRFNEIRKQREKMGKTISPYEDLSFRSYIKDNLCKKTKADEIEEKEFYDLLQKKNLEIYDMLLTKHKDTIYKKRPNSATIDILVKGKEKFKSLIIENQFEVILEILKLFSATRNVSDLQHIGGSKNAGNARVGNKISSLDNCILIYQSITGIFEKRIDLLKI

SEQ ID NO: 804 - protein, 631 aa, Treponema denticola
MLWQTLKLVKEISHITQAPPKKIFIEMAKGAELEPARTKTRLKILQDLYNNCKNDADAFSSEIKDLSGKIENEDNLRLRSDKLYLYYTQLGKCMYCGKPIEIGHVFDTSNYDIDHIYPQSKIKDDSISNRVLVCSSCNKNKEDKYPLRSEIQSKQRGFWNFLQRNNFISLEKLNRLTRTTPISDDETAKFIARQLVETRQATKVAAKVLEKMFPETKIVYSKAETVSMFRNKFDIVKCREINDFHHAHDAYLNIVVGNIYNTKFTNNPWNFIKEKRDNPKIADTYNYYKVFDYDVKRNNITAWEKGKTIITVKDMLKRNTPIYTRQAACKKGGLFDQTIMKKGLGQHPLKKEGPFSNISKYGGYNKVSAAYYTLIEYEEKENKIRSLETIPLYLVKDIQKSQEKLKSYLTDLLGKKEIKILVPKIKINSLLKINGFPCHITGKTNDSFLLRPAVQFCCSNDEVLYFKKIIRFNEIRSQREKMGKTISPYEDLSFRSYIKENLCKKTKNDEIGEKEFYDLLQKKNLEIYDMLLTKHKDTIYNKRPNSTTLGMLTKGRYEFINLKPKDQIIVMLEILKLFCTTREAIDLGLIKGKPAAGVATLGKKISNLDNCILIYQSITGIFEKRIDLLKV

SEQ ID NO: 805 - protein, 631 aa, Treponema denticola
MLWQTLKLVKEISHITQAPPKKIFIEMAKGAELEPARTKTRLKILQDLYSSCKNDADAFSSEIQYLSGKIENEDNLRLRSDKLYLYYTQLGKCMYCGKPIEIGHVFDTSNYDIDHIYPQSKIKDDSISNRVLVCSSCNKNKEDKYPLKSEIQSKQRGFWNFLQRNNFISLEKLNRLTRTTPISDDETAKFIARQLVETRQATKVAAKVLEKMFPETKIVYSKAETVSMFRNKFDIIKCREINDFHHAHDAYLNIVVGNVYNTKFTNNPWNFIKEKRDNPKIADTYNYYKVFDYDVKRNNITAWEKGKTIITVKDMLKRNTPIYTRQAACKKGELFNQTIMKKGLGQHPLKKEGPFSNISKYGGYNKVSAAYYTLIEYEEKVNKIRSLETIPLYLVKDIQKDQDVLKSYLTDLLGKKEIKILVPKIKINSLLKINGFPCHITGKTGDSFVLRPAVQFCCSNDEVLYFKKIIRFNEIRSQREKMGKTISPYEDLSFRSYIKENLCKKTKADEIGEKEFYDLLQKKNLEIYDMLLTKHKDTIYNKRPNSTTLGMLTKGRYEFINLKPKDQIIVMLEILKLFCTTREAIDLGLIKGKPAAGVATLGKKISNLDNCILIYQSITGIFEKRIDLLKV

SEQ ID NO: 806 - protein, 370 aa, Treponema denticola
MTEIETGTFLPKQISKSNAEIPYQLRKMELEKILSNAEKHFSFLKQKDEKGLSHSEKIIMLLTFKIPYYIGPINDNHKKSFPDRCWVVKKEKSPSGKTTPWNFFDHIDKEKTAEEFITSRTNFCTYLVGESVLPKSSLLYSEYTVLNEINNLQIIIDGKNICDIKLKQKIYEELFKKYKKITQKQISTFIKHEGICNKTDEVIILGIDKECTSSLKSYIELKNIFGKQVDEISTKNMLEDIIRWAAIYDEGEGKTILKTKIKAEYGKYCSDEQIKKILNLKFSGWGRLSRKFLETVTSEMPGFSEPVNIITAMRETQNNLMELLSSEFKFTENIKKINSGFEDVEKQFSYDGLVKPLFLSPSVKKCCGRL

SEQ ID NO: 807 - protein, 591 aa, Treponema phagedenis
MARGKEAEKGRTSSRYASIKALYENCKQDLADYDAVLEQFKSEEPLRLRSDKLYLYYTQLGRCMYTGRVIDIDRLMSDNSAYDIDHIYPRSKIKDDSLTNRVLVVKDANQDKRDEPLSPQIQDKQKGFWDFLKHNNFISIEKYERLTYRGYFTEEMLSGFIARQLVETRQGTKTAGQILEQLYPDSTVVYCKAANTSEFRQKFNLIKCREINDLHHAHDAYLNIAVGNVYYTKFTSNPRNFMKLKEPYNLRELFDRDVERNNTIAWVKNKTITTIKDMLKRNTPLYTRYAYCKTGGFFDQNIMKKGKGQFPLKENSPLSDISKYGGYNKVSGAYFILVQKKEKDAVVRILETVPLYLLNKPGKESENVREYLSTALGTKDFKILIPKIKINSLFKINGFLVHITGKTNDRFLVRSAVQFFCDDNLTLFFKRIIAFNGLRNLNKDKSMTAYDDNTMRVYVRGNLFKDKNQLFDKNKFNEIVKGKNISVYKDMVKRYETSIYKFRPNTAVIPILKSGEDKFINLPIEEQFKILQEILKLFGAINGTANLTLIGGRPSTGEMKISNNISNLKQCILIHQSPTGVFEQQIDLLKI

SEQ ID NO: 808 - protein, 1062 aa, Treponema sp.
MIMKLEKWRLGLDLGTNSIGWSVFSLDKDNSVQDLIDMGVRIFSDGRDPKTKEPLAVARRTARSQRKLIYRRKLRRKQVFKFLQEQGLFPKTKEECMTLKSLNPYELRIKALDEKLEPYELGRALFNLAVRRGFKSNRKDGSREEVSEKKSPDEIKTQADMQTHLEKAIKENGCRTITEFLYKNQGENGGIRFAPGRMTYYPTRKMYEEEFNLIRSKQEKYYPQVDWDDIYKAIFYQRPLKPQQRGYCIYENDKERTFKAMPCSQKLRILQDIGNLAYYEGGSKKRVELNDNQDKVLYELLNSKDKVTFDQMRKALCLADSNSFNLEENRDFLIGNPTAVKMRSKNRFGKLWDEIPLEEQDLIIETIITADEDDAVYEVIKKYDLTQEQRDFIVKNTILQSGTSMLCKEVSEKLVKRLEEIADLKYHEAVESLGYKFADQTVEKYDLLPYYGKVLPGSTMEIDLSAPETNPEKHYGKISNPTVHVALNQTRVVVNALIKEYGKPSQIAIELSRDLKNNVEKKAEIARKQNQRAKENIAINDTISALYHTAFPGKSFYPNRNDRMKYRLWSELGLGNKCIYCGKGISGAELFTKEIEIEHILPFSRTLLDAESNLTVAHSSCNAFKAERSPFEAFGTNPSGYSWQEIIQRANQLKNTSKKNKFSPNAMDSFEKDSSFIARQLSDNQYIAKAALRYLKCLVENPSDVWTTNGSMTKLLRDKWEMDSILCRKFTEKEVALLGLKPEQIGNYKKNRFDHRHHAIDAVVIGLTDRSMVQKLATKNSHKGNRIEIPEFPILRSDLIEKVKNIVVSFKPDHGAEGKLSKETLLGKIKLHGKETFVCRENIVSLSEKNLDDIVDEKIKSKVKDYVAKHKGQKIEAVLSDFSKENGIKKVRCVNRVQTPIEITSGKISRYLSPEDYFAAVIWEIPGEKKTFKAQYIRRNEVEKNSKGLNVVKPAVLENGKPHPAAKQVCLLHKDDYLEFSDKGKMYFCRIAGYAATNNKLDIRPVYAVSYCADWINSTNETMLTGYWKPTPTQNWVSVNVLFDKQKARLVTVSPIGRVFRK

SEQ ID NO: 809 - protein, 281 aa, Treponema vincentii
MKTLGLDIGTNSIGWGIVDETANKIEDCGVYIFPEGVKKEKGNESSKAAERTSFRLARRLKFRRKLRKCETLKVLIKNKMCPLTMEELEKWRKQKIYPVSQDFLNWYRTDELKNWEPYFLRKKCAEQKAGPYEIGRALYHLAQRRGFLSNRKESTKASDGKVSKSIDELSSLMDGRTLGQYFYELKQSGEKVRGKYTSRKEHYEKEFNKICEVQEISPELKDDLYRAIFFQRKLKSQKFLVGKCTFERNKPRAPISHFEFEEFRMLSFINSIKIAKKLRRR

SEQ ID NO: 810 - protein, 675 aa, uncultured bacterium
MTAENYSNVRFAFDIGTNSIGWAVFQLNDKQEATSILNAGARIFSDGRDPKTFEPLAVRRRNVRSASRMRDRYLRRRKRTLDKLIGYGLLPEDKAERDKILLETNDKPSGSTDKKTDPYSLRARALEEKLPLAYVARALFHIGQRRGFKSNRKADRKSNEKGKIAAGIEELSGLMHQSHAPTLGAYLAKRREEGHVVRLRASSEALTNKAYAFYPERAMLEDEFHKIWQAQAEYYPDVLTKEREEELFHVMFFQRPLKEQKVGLCTLVEGELRLPKSDPLFQQFRLYKEINELAIILPDLSQRKLTMEERDTLITLMRPAKTKTFAALRKALKIPAGGRFNKETENRKQLTGDEVYSVFSKPELFGGDWAKFSIEQQREIIDQLNNEENPDKLEEWLKNKFPKLSDEQRSEIINANLPDGYGRFGITATSKILEQLKKDVISEAEAAHRCGFDHSLANRNWKGLDELPRYQEVLERHIVPGTGDKNDIYDIYKGRLTNPTVHIGLNQVRRLTNRLIKAYGKPWQIVVELARDLPMSSEERKEHNKTLNDNIKAGFERTQKLERLGQKDNANNRLLLKLWEELGKDPDDRKSIYSGTRITEPMLFSGEVEIDHILPFSLTYDDSYANKILCLREENRIKRNRAPADVTEWKDRYDEIIGRSKNCQRTNKNVLGPMQ

SEQ ID NO: 811 - protein, 1017 aa, uncultured bacterium]
MRVDSLGRCLSDEEWARVIYHLCKHRGFHWISRAEAKQTEGDSKSEGGKVKQGLAGTAKLMDEKGYRSAAEMVLAEFPEAQRNKQGEYRKALSRELLAKELALLFARQRVFGNRHATDTLETAILGNSDKKSGLFWQQKPALAGADLLKMLGTCTFEKNEYRAPKASFTAERHVWLTRLNNLRIVTDGITRQLTEQERQLVLPLPYRQAGDLTYKQLGMALTKAGLLEAGCFKFIGLAYPTEAQKAEGKTKDPESATLVKIPAWQELRQTLNKASLNDEWEKLSGDALCGQPEIFDKIAWILSVYKDDDEVRTELAKLVLPNPEGLTEALLNIRFDKFHALSLKALRAIVPHMEKGLRYDEACVQAGYHHSQLHKIGEGEHKYLPPLYDGRDGDGRMIFAEDADIPRNPVVLRSLNQARKVVNAIIRRYGSPSAVHIEMARDLSRPFDERNKIKKDQDEYQARNQRDREQFIELFGHPPKGLEFEKWRLYREQNGQCAYSQKPLASSGDVAEIFLDGSTEIDHALPYSRSFDDSKNNKVLVLTRENRDKGNRTPYEYLGGAENSERWQRFFSFVESNKAYRLAKRTRLLRKDFGAKESEEFRERNLNDTRYVCRFFKNYVEQHLKLAEGSEAKRCVVVSGQLTNFLRTRWGLLKIRSDSDRHHALDAAVVAACSHSMVQRLSNYSRTRELEQVRDGFVNIETGEIVNPAMHQQLREHFPDPWPYFRHELEARLKIDSPALLREEMARLSSYTEEELAALKPLFVSRAPQRRNGGAAHKDTIYGQPEKLKKNGSVSQKVALASLALKDIDLLADPHRNAKLYGAIRERLEAHGGKGDKAFPATNPLRKPDKEGNPTGPIVRTVTKVIDKLSGIPVRGGIAKNDTMLRVDVFTKAGRFHLVPVYVHHRVTGLPNQAITRGKDENQWAIIDDTFEWRFSLYPNDLVQIRLKDETHLGYYASTDRSTSSISIWAHDRNQSVGKDGLIRSIGVTTAKDIEKFHVDTLGNVYPAPPEKRRGLA

SEQ ID NO: 812 - protein, 600 aa, uncultured bacterium]
VNAIIKKHGSLSAVHIEMARDLSRPLDERREVKKLQEEFKDRNDKARESFEADHGYRPKGIVFEKWMLYREQHGKCAYSMEGLDIDRVLNDANYAQIDHALPYSRSYDDSKNNKVLVLTRENQNKGNRTAYEYLTSFAGGEDGDRWRNYAAWVNSNKSYRMAKRNRLLRKNYGPDEASGFKDRNLNDTRYICKFFKNYVEEHLQLAPRADGNANKRCVVVNGQLTAFLRARWGLSKVRSESDRHHALDAAVVAACSHGMVKALADYARNKEVAYLREGFPDPETGEIINPEAHARGVHHFPEPWAHFRHELQVRLYSDDLQALREDLQRLGTYSEQDLLGVRTLFVSRAPQRRNDGAVHKETIYAQPEALRKQGGVVQKVPLTSLSLKDLDNLADPHRNAKLYTALRARLEAHGGKADKAFGPDQPFYKPDKNGNPTGPIVRTIKLVIDKLSGIPIRGGVAKNDTMLRVDVFTKAGKFHLVPVYVHHRVTGLPDRAIVAFKDEVEWTQVDDSFKFLFSIHPNDLIRIGLKAKEPMIGYFASCHRGTGAFNVWSHDRNTSVGKSGSVEGIGIKTALSLEKLNIDVLGNVYPARPEQRHGLA

SEQ ID NO: 813 - protein, 1011 aa, uncultured delta
MSSKAIDSLEQLDLFKPQEYTLGLDLGIKSIGWAILSGERIANAGVYLFETAEELNSTGNKLISKAAERGRKRRIRRMLDRKARRGRHIRYLLEREGLPTDELEEVVVHQSNRTLWDVRAEAVERKLTKQELAAVLFHLVRHRGYFPNTKKLPPDDESDSADEEQGKINRATSRLREELKASDCKTIGQFLAQNRDRQRNREGDYSNLMARKLVFEEALQILAFQRKQGHELSKDFEKTYLDVLMGQRSGRSPKLGNCSLIPSELRAPSSAPSTEWFKFLQNLGNLQISNAYREEWSIDAPRRAQIIDACSQRSTSSYWQIRRDFQIPDEYRFNLVNYERRDPDVDLQEYLQQQERKTLANFRNWKQLEKIIGTGHPIQTLDEAARLITLIKDDEKLSDQLADLLPEASDKAITQLCELDFTTAAKISLEAMYRILPHMNQGMGFFDACQQESLPEIGVPPAGDRVPPFDEMYNPVVNRVLSQSRKLINAVIDEYGMPAKIRVELARDLGKGRELRERIKLDQLDKSKQNDQRAEDFRAEFQQAPRGDQSLRYRLWKEQNCTCPYSGRMIPVNSVLSEDTQIDHILPISQSFDNSLSNKVLCFTEENAQKSNRTPFEYLDAADFQRLEAISGNWPEAKRNKLLHKSFGKVAEEWKSRALNDTRYLTSALADHLRHHLPDSKIQTVNGRITGYLRKQWGLEKDRDKHTHHAVDAIVVACTTPAIVQQVTLYHQDIRRYKKLGEKRPTPWPETFRQDVLDVEEEIFITRQPKKVSGGIQTKDTLRKHRSKPDRQRVALTKVKLADLERLVEKDASNRNLYEHLKQCLEESGDQPTKAFKAPFYMPSGPEAKQRPILSKVTLLREKPEPPKQLTELSGGRRYDSMAQGRLDIYRYKPGGKRKDEYRVVLQRMIDLMRGEENVHVFQKGVPYDQGPEIEQNYTFLFSLYFDDLVEFQRSADSEVIRGYYRTFNIANGQLKISTYLEGRQDFDFFGANRLAHFAKVQVNLLGKVIK

SEQ ID NO: 814 - protein, 1011 aa, uncultured delta proteobacterium HF0070_07E19; identical to SEQ ID NO: 813

SEQ ID NO: 815 - protein, 1120 aa, Veillonella sp.
MGFKANLVNLFTDEDIEVILPEEKEFKSINLHEGIYEDVRDAYEDAWGDRFAIVDQCKVLHDIIVISSIIKPGQSLSEAKIESYNQHKEDLVLLKSVLKEDRKLYDDMFVVDTDKGTNYVKYTKQGVNGNTSATQEEFYKYVRKVVSVLPETEHTRRIVQKLEEGTFLPLQRISKNGVVPYQLHKEELVRILDKATVNFPFLNKVENGLTVADKIISILEFKIPYYVGPLNPTHSIENGGFAWVVRKEAGQVLPWNFEQKVDVQASAVKFIENLTNKCTYLIDQDVLPKYSLLYAEFSLLNELNNIRVNDKPLPADVKQAFIRDHFISLQDSKTATKKVVAKYLVDNNYVSQPPIITGMDQQIATKLTSHRDMTRILGEHFDHAMAEDIIRYITIFGESKDMLRQVLKNYYGDRLTTEQIKKLGKLTYTGWGRLSKKFLSDIWGMKKNDDDAEAGTIIEHMREGQENLMQLLSSSYSFIDVVQEYVTNVLGEKEKTAFEMLEDLSLSPMVKRSVWQTLRILDEIVSIRKELPKKIFVEVARTNKADKKRTQSRKALLEELYKQIKDEDVHVLQQELESKEDSALNSKKLYLYFTQMGRCMYSGRRIDIHELFTDKYDIDHIYPRSLTKDDSWHNIVLVEKQLNAEKTDRFPILSAIQSKQKGFWKLLWDRGFISEKKYDRLVRTTDLTDEELNQFINRQMVSTNQSVKAVTTLLHQLYPETEVVFSKAENVSDFRHDYDFVKVRSINHHHHAKDAYLNIVVGNVYHEKFTKNFLSFAKQKGTRRTYNLTKIFEYEIKLTEESKKVIWDPNIHMDIVKKMMKSNDVRVTQRAVPQKGGLSDETIYKKGIAKRGVYLPLKSSDERVRDVEKYGGRTSITISEYIILNIRDTSDQDRIEIFSLPLYIAGKKDIHKAIEEAYLSTCKKPASVVDIQILYRGLYIGSKVNINGFTYYMGGKTGSNVSIDSAVDVVMDITSSVYIKLLEKVAIKKIENPKTFRIENIKTSYNHKEVTVSKEQNIALYQELLKKLDTPLFSKMKGNKLEEFRTVGFDTFIALSLEEQASVLLEVLNVLTNFKTKRDITKIGMTSSRSTLGINISNTEQFSVITTSITGLYEQEIKIK

SEQ ID NO: 816 - protein, 983 aa, Verminephrobacter aporrectodeae
MRRRRDRLLKRKARMHDQLMRHGFFPADAAGRKVLERLNPYQLRAKGLHQALTPGEFARALFHINQRRGFQSNRKTDRKDNESGALKQAISELRAQIHDSGCATVGEWFWKERMQQKPEGVHRQGVRARYRETPYTTDEGRQRIDKRYDLYVDRAMIEQEFDALWAVQAALQPGLFTDAACKELRYTLLFQRKLRPVKPGRCTLLPEEERAPLALPSTQRFRILQEVNHLRLLDEALREVPLTLAQRDALVAALESQGKLGFAPMRKLLKLPGTVKFNLEDEKRTELKGNATSAILARKDLFGPAWAGFDAALQDEIVWQLVSEEGEGRLIAWLQQHTGVDEARAEAIADTSLPEGYGSLSRKALERIVPALQREVCSYDKAVQAAGFAHHSDLGFDFEHSGDEVQQVGERIIASTGEVRPLFAFKQLPYYGKALQRHVAFGSGKPEDPEEKRHGKIANPTVHIGLNQVRTVVNALIRRYGRPSEVVVELARDLKQSREQQQETQRKQAENQRRNTRIRERIAETLGISPERVRSSDIQKWILWEELSFDVVDRRCPYSGEQISTTMLLSPKVEIEHILPFSQTLDDSLNNRTVALREANRIKRNRTPWDARADFEARGWSYEGILHRAERMPLRKRYRFAPDGYQRWLGEDKDFLARALNDTRYLSRVAANYLRLVCPKPQGVRVIPGRMTAMLRAKFGLNDVLGLDGEKNRNDHRHHAVDACVIGVTDQGLMQRFARASAQAREDGLTRLVQDMPLPWPSYRDHVERAVRHIWVSHKPDHGFEGAMMEETAYGIRKDGSIKPRRKADGSAGREVVNLIRITESRQPVRHGVDSQGQPLPYKGYVGGSNYCIEITANDQGKWEGAVISTFEAYRIVRASGWGRLRHCSHGQNGRPLMMRLMIGDAVRLALDGSEKTMRVVKISANGQVFLVAPNEANVDARNRDKADPFAYVSKKAGSFQSAKARQVSISPIGELRDPGFKG

SEQ ID NO: 817 - protein, 4 aa, Artificial Sequence
  Synthetic sequence
AAAA

SEQ ID NO: 818 - protein, 4 aa, Artificial Sequence
  Synthetic sequence
AAAA

SEQ ID NO: 819 - protein, 4 aa, Artificial Sequence
  Synthetic sequence
AAAA

SEQ ID NO: 820 - protein, 4 aa, Artificial Sequence
  Synthetic sequence
AAAA

SEQ ID NO: 821 - protein, 4 aa, Artificial Sequence
  Synthetic sequence
AAAA

SEQ ID NO: 822 - protein, 4 aa, Artificial Sequence
  Synthetic sequence
AAAA

SEQ ID NO: 823 - protein, 4 aa, Artificial Sequence
  Synthetic sequence
AAAA

SEQ ID NO: 824 - protein, 4 aa, Artificial Sequence
  Synthetic sequence
AAAA

SEQ ID NO: 825 - protein, 4 aa, Artificial Sequence
  Synthetic sequence
AAAA

SEQ ID NO: 826 - protein, 4 aa, Artificial Sequence
  Synthetic sequence
AAAA

SEQ ID NO: 827 - RNA, 86 nt, Artificial Sequence
  Synthetic sequence
ggaaccauucaaaacagcauagcaaguuaaaauaaggcuaguccguuaucaacuugaaaaaguggcaccgagucggugcuuuuuuu

SEQ ID NO: 828 - RNA, 67 nt, Artificial Sequence
  Synthetic sequence
uagcaaguuaaaauaaggcuaguccguuaucaacuugaaaaaguggcaccgagucggugcuuuuuuu

SEQ ID NO: 829 - RNA, 88 nt, Streptococcus pyogenes
guuggaaccauucaaaacagcauagcaaguuaaaauaaggcuaguccguuaucaacuugaaaaaguggcaccgagucggugcuuuuuu

SEQ ID NO: 830 - RNA, 93 nt, Listeria innocua
auauuguuaguauucaaaauaacauagcaaguuaaaauaaggcuuuguccguuaucaacuuuuaauuaaguagcgcuguuucggcgcuuuuuu

SEQ ID NO: 831 - RNA, 104 nt, Streptococcus mutans
uguuggaaucauucgaaacaacacagcaaguuaaaauaaggcagugauuuuuaauccaguccguacacaacuugaaaaagugcgcaccgauucggugcuuuuuu

SEQ ID NO: 832 - RNA, 95 nt, Streptococcus thermophilus
uugugguuugaaaccauucgaaacaacacagcgaguuaaaauaaggcuuaguccguacucaacuugaaaagguggcaccgauucgguguuuuuuu

SEQ ID NO: 833 - RNA, 118 nt, Streptococcus thermophilus
uaauaauaguguaagggacgccuuacacaguuacuuaaaucuugcagaagcuacaaagauaaggcuucaugccgaaaucaacacccugucauuuuauggcaggguguuuucguuauuu

SEQ ID NO: 834 - RNA, 112 nt, Neisseria meningitidis
cauauugucgcacugcgaaaugagaaccguugcuacaauaaggccgucugaaaagaugugccgcaacgcucugccccuuaaagcuucugcuuuaaggggcaucguuuauuuc

SEQ ID NO: 835 - RNA, 110 nt, Pasteurella multocida
gcauauuguugcacugcgaaaugagagacguugcuacaauaaggcuucugaaaagaaugaccguaacgcucugccccuugugauucuuaauugcaaggggcaucguuuuu

SEQ ID NO: 836 - RNA, 115 nt, Mycoplasma mobile
uauuauguauuucgaaauacagauguacaguuaagaauacauaagaaugauacaucacuaaaaaaaggcuuuaugccguaacuacuacuuauuuucaaaauaaguaguuuuuuuu

SEQ ID NO: 837 - RNA, 26 nt, Artificial Sequence
  Synthetic sequence
uagcaaguuaaaauaaggcuaguccg

SEQ ID NO: 838 - RNA, 36 nt, Streptococcus pyogenes
uuguuggaaccauucaaaacagcauagcaaguuaaa

SEQ ID NO: 839 - RNA, 36 nt, Streptococcus mutans
guguuggaaucauucgaaacaacacagcaaguuaaa

SEQ ID NO: 840 - RNA, 36 nt, Streptococcus thermophilus
gguuugaaaccauucgaaacaacacagcgaguuaaa

SEQ ID NO: 841 - RNA, 36 nt, Streptococcus thermophilus
cuuacacaguuacuuaaaucuugcagaagcuacaaa

SEQ ID NO: 842 - RNA, 36 nt, Listeria innocua
auauuguuaguauucaaaauaacauagcaaguuaaa

SEQ ID NO: 843 - RNA, 34 nt, Listeria innocua
auuguuaguauucaaaauaacauagcaaguuaaa

SEQ ID NO: 844 - RNA, 36 nt, Treponema denticola
auuuaagauccaucuuaaauuacacaacgaguucaa

SEQ ID NO: 845 - RNA, 36 nt, Neisseria meningitidis
auugucgcacugcgaaaugagaaccguugcuacaau

SEQ ID NO: 846 - RNA, 38 nt, Neisseria meningitidis
auauugucgcacugcgaaaugagaaccguugcuacaau

SEQ ID NO: 847 - RNA, 36 nt, Streptococcus gordonii; identical to SEQ ID NO: 841

SEQ ID NO: 848 - RNA, 36 nt, Bifidobacterium bifidum
augaucaaggucauugaccugacaggcauaaauuga

SEQ ID NO: 849 - RNA, 36 nt, Lactobacillus salivarius
gguuuugaccucauugauuuaacauucugaguugaa

SEQ ID NO: 850 - RNA, 37 nt, Francisella tularensis
guuucaguuguuagauuauuugguauguacuuguguu

SEQ ID NO: 851 - RNA, 37 nt, Francisella tularensis
auuacagagcauuaauuauuugguacauuuauaauuu

SEQ ID NO: 852 - RNA, 37 nt, Legionella pneumophila
auuucaggguaucgaaauuuagaugauuucuaauuua

SEQ ID NO: 853 - RNA, 36 nt, Nitratifractor salsuginis
uguaacaggguaggguuuuuugaggggucuuaaaau

SEQ ID NO: 854 - RNA, 36 nt, Butyrivibrio fibrisolvens
aguuucuaaucacuuaauuuuuucggaccuacuaaa

SEQ ID NO: 855 - RNA, 36 nt, Streptobacillus moniliformis
gauucacauuauucaaguuuacuacagauucuguau

SEQ ID NO: 856 - RNA, 36 nt, Mycoplasma mobile
aguuaagaauacauaagaaugauacaucacuaaaaa

SEQ ID NO: 857 - RNA, 44 nt, Capnocytophaga ochracea
auugugaauugcuuucaaauugugcgacaaaaguagguauaaua

SEQ ID NO: 858 - RNA, 36 nt, Acidovorax ebreus
auugcagcaacggcucucaccccggauaaccacaau

SEQ ID NO: 859 - RNA, 36 nt, Wolinella succinogenes
auagccgcugccuacucagccauuuagcgcagcgac

SEQ ID NO: 860 - RNA, 37 nt, Wolinella succinogenes
uuuguuaaagcuggaugggauuauuauagaguguugc

SEQ ID NO: 861 - RNA, 37 nt, Wolinella succinogenes
uuucaaggcaucgaacggauuugcuauaaaguguugc

SEQ ID NO: 862 - RNA, 36 nt, Prevotella ruminicola
uuuugcacacguaagauuccuacaucuuaucacaau

SEQ ID NO: 863 - RNA, 48 nt, Fibrobacter succinogenes
auugugaauugcuuucagauuaugaaaauaauauaguuaaaauuuuug

SEQ ID NO: 864 - RNA, 36 nt, Campylobacter jejuni
auuuuauuucgauuuuaaucaacccuaaauuucaau

SEQ ID NO: 865 - RNA, 36 nt, Campylobacter jejuni
auuuuagucccuuuuuaaauuucuuaugagauuaua

SEQ ID NO: 866 - RNA, 25 nt, Campylobacter jejuni
aagaaauuuaaaaagggacuaaaau

SEQ ID NO: 867 - RNA, 36 nt, Pasteurella multocida
auuguagcaacgucucucauuucgcagugcaacaau

SEQ ID NO: 868 - RNA, 36 nt, Rhodopseudomonas palustris
gccguggcuuuccuaccgauuucccaccgcaugauu

SEQ ID NO: 869 - RNA, 36 nt, Olsenella uli
ucugaauuaccagucagaacgauacugcgagucaaa

SEQ ID NO: 870 - RNA, 36 nt, Rhodospirillum rubrum
guuccauggccccgucccacacgccaugauagagcg

SEQ ID NO: 871 - RNA, 36 nt, Rhodospirillum rubrum
aaacgggagaaccgucccacacggccaugguagagu

SEQ ID NO: 872 - RNA, 36 nt, Dinoroseobacter shibae
uuaacggcucgaccgcgaauucugaacguaaagaca

SEQ ID NO: 873 - RNA, 36 nt, Verminephrobacter eiseniae
uuagcguccagagcgcauaucccagugagauauccg

SEQ ID NO: 874 - RNA, 75 nt, Streptococcus pyogenes
aaacagcauagcaaguuaaaauaaggcuaguccguuaucaacuugaaaaaguggcaccgagucggugcuuuuuuu

SEQ ID NO: 875 - RNA, 77 nt, Listeria innocua
aaauaacauagcaaguuaaaauaaggcuuuguccguuaucaacuuuuaauuaaguagcgcuguuucggcgcuuuuuu

SEQ ID NO: 876 - RNA, 73 nt, Artificial Sequence
  Synthetic sequence
aacagcauagcaaguuaaaauaaggcuaguccguuaucaacuugaaaaaguggcaccgagucggugcuuuuuu

SEQ ID NO: 877 - RNA, 33 nt, Francisella novicida
uauaaauguaccaaauaauuaaugcucuguaau

SEQ ID NO: 878 - RNA, 74 nt, Campylobacter jejuni
aagaaauuuaaaaagggacuaaaauaaagaguuugcgggacucugcgggguuacaauccccuaaaaccgcuuuu

SEQ ID NO: 879 - RNA, 96 nt, Francisella novicida
aucuaaaauuauaaauguaccaaauaauuaaugcucuguaaucauuuaaaaguauuuugaacggaccucuguuugacacgucugaauaacuaaaaa

SEQ ID NO: 880 - RNA, 109 nt, Streptococcus thermophilus2
uguaagggacgccuuacacaguuacuuaaaucuugcagaagcuacaaagauaaggcuucaugccgaaaucaacacccugucauuuuauggcaggguguuuucguuauuu

SEQ ID NO: 881 - RNA, 110 nt, Mycoplasma mobile
uguauuucgaaauacagauguacaguuaagaauacauaagaaugauacaucacuaaaaaaaggcuuuaugccguaacuacuacuuauuuucaaaauaaguaguuuuuuuu

SEQ ID NO: 882 - RNA, 92 nt, Listeria innocua
auuguuaguauucaaaauaacauagcaaguuaaaauaaggcuuuguccguuaucaacuuuuaauuaaguagcgcuguuucggcgcuuuuuuu

SEQ ID NO: 883 - RNA, 89 nt, Streptococcus pyogenes
guuggaaccauucaaaacagcauagcaaguuaaaauaaggcuaguccguuaucaacuugaaaaaguggcaccgagucggugcuuuuuuu

SEQ ID NO: 884 - RNA, 107 nt, Streptococcus mutans
guuggaaucauucgaaacaacacagcaaguuaaaauaaggcagugauuuuuaauccaguccguacacaacuugaaaaagugcgcaccgauucggugcuuuuuuauuu

SEQ ID NO: 885 - RNA, 96 nt, Streptococcus thermophilus
uugugguuugaaaccauucgaaacaacacagcgaguuaaaauaaggcuuaguccguacucaacuugaaaagguggcaccgauucgguguuuuuuuu

SEQ ID NO: 886 - RNA, 102 nt, Neisseria meningitidis
acauauugucgcacugcgaaaugagaaccguugcuacaauaaggccgucugaaaagaugugccgcaacgcucugccccuuaaagcuucugcuuuaaggggca

SEQ ID NO: 887 - RNA, 110 nt, Pasteurella multocida; identical to SEQ ID NO: 835

SEQ ID NO: 888 - RNA, 37 nt, Francisella novicida
aacacaaguacauaccaaauaaucuaacaacugaaac

SEQ ID NO: 889 - RNA, 37 nt, Francisella novicida
aaauuauaaauguaccaaauaauuaaugcucuguaau

SEQ ID NO: 890 - RNA, 37 nt, Wolinella succinogenes; identical to SEQ ID NO: 861

SEQ ID NO: 891 - RNA, 37 nt, Wolinella succinogenes; identical to SEQ ID NO: 860

SEQ ID NO: 892 - RNA, 37 nt, gamma proteobacterium
auuucaguguauagaauguugggaugcauucugaaua

SEQ ID NO: 893 - RNA, 37 nt, gamma proteobacterium
auaacaagggaguauuugcuggaauaagcucugaaac

SEQ ID NO: 894 - RNA, 37 nt, Sutterella wadsworthensis
guuuccaagcaauagcucguggcguuaugauuucugu

SEQ ID NO: 895 - RNA, 37 nt, Sutterella wadsworthensis
ggugauuuccuauagcucauagcguuaugaucucuaa

SEQ ID NO: 896 - RNA, 37 nt, Legionella pneumophila; identical to SEQ ID NO: 852

SEQ ID NO: 897 - RNA, 36 nt, Listeria innocua; identical to SEQ ID NO: 842

SEQ ID NO: 898 - RNA, 36 nt, Streptococcus thermophilus; identical to SEQ ID NO: 840

SEQ ID NO: 899 - RNA, 36 nt, Streptococcus mutans; identical to SEQ ID NO: 839

SEQ ID NO: 900 - RNA, 36 nt, Streptococcus pyogenes; identical to SEQ ID NO: 838

SEQ ID NO: 901 - RNA, 36 nt, Fusobacterium nucleatum
auuuuuaauuuaaguaauaaaaaauggagcauauac

SEQ ID NO: 902 - RNA, 36 nt, Filifactor alocis
aguugacuaccauaugagauuacacuacacgguuca

SEQ ID NO: 903 - RNA, 36 nt, Treponema denticola; identical to SEQ ID NO: 844

SEQ ID NO: 904 - RNA, 36 nt, Solobacterium moorei
cuuauaccaguaagauaauuuacauaguaaguucaa

SEQ ID NO: 905 - RNA, 36 nt, Veillonella atypica
guuuuggagguuuacagaauuacacuacgaguucaa

SEQ ID NO: 906 - RNA, 36 nt, Finegoldia magna
guuuaauaccuauaugagauuacaucaugaguucaa

SEQ ID NO: 907 - RNA, 36 nt, Olsenella uli; identical to SEQ ID NO: 869

SEQ ID NO: 908 - RNA, 36 nt, Lactobacillus rhamnosus
caacuugaauugauugaucugacaucuacgaguuga

SEQ ID NO: 909 - RNA, 36 nt, Lactobacillus gasseri
ugauuagauuucauugaucuaacagccaucuaaaac

SEQ ID NO: 910 - RNA, 36 nt, Lactobacillus gasseri
acacuaaacuuuauugaucuaacaaccagauuuaaa

SEQ ID NO: 911 - RNA, 36 nt, Oenococcus kitaharae
ggguucuaccucauugaucugacacacagcauugaa

SEQ ID NO: 912 - RNA, 36 nt, Bifidobacterium bifidum; identical to SEQ ID NO: 848

SEQ ID NO: 913 - RNA, 36 nt, Staphylococcus pseudintermedius
guuuuacuucuuucuaaauaaacauaguuaaguuaa

SEQ ID NO: 914 - RNA, 36 nt, Eubacterium rectale
auuuuauagucacguaaauuuuucagaucuacuaaa

SEQ ID NO: 915 - RNA, 38 nt, Enterococcus faecalis
auuuuacugauaagaaauuauugagaaucuacaaaaau

SEQ ID NO: 916 - RNA, 36 nt, Streptococcus thermophilus; identical to SEQ ID NO: 841

SEQ ID NO: 917 - RNA, 36 nt, Staphylococcus lugdunensis
cuuguacuuauaccuaaaauuacagaaucuacugaa

SEQ ID NO: 918 - RNA, 36 nt, Eubacterium dolichum
aucauaaucuagcaaaaguuuauaugaucuaacaaa

SEQ ID NO: 919 - RNA, 36 nt, Mycoplasma mobile; identical to SEQ ID NO: 856

SEQ ID NO: 920 - RNA, 36 nt, Mycoplasma ovipneumoniae
auuuuacucuaguaagaaauugucgcacaaaaauaa

SEQ ID NO: 921 - RNA, 36 nt, Mycoplasma gallisepticum
auuauugcuuacacaauuauugucgugcuaaaauaa

SEQ ID NO: 922 - RNA, 36 nt, Mycoplasma canis
auuauuguuuacccaaauauuguacauccuaaauca

SEQ ID NO: 923 - RNA, 36 nt, Mycoplasma synoviae
uacuuacuuaacaaaauaauuguacgauuccaaaau

SEQ ID NO: 924 - RNA, 36 nt, Aminomonas paucivorans
gccuucccucccugccgaaggagcagauccucuccu

SEQ ID NO: 925 - RNA, 36 nt, Clostridium perfringens
uuauaguaacuaguuaaacucucgauaugcuauacc

SEQ ID NO: 926 - RNA, 36 nt, Clostridium cellulolyticum
auuauagcaacaauucaggcuccgauaugccauaau

SEQ ID NO: 927 - RNA, 36 nt, Acidovorax ebreus; identical to SEQ ID NO: 858

SEQ ID NO: 928 - RNA, 36 nt, Neisseria meningitidis; identical to SEQ ID NO: 845

SEQ ID NO: 929 - RNA, 36 nt, Pasteurella multocida
auuguugcacugcgaaaugagagacguugcuacaau

SEQ ID NO: 930 - RNA, 36 nt, phylotype Rs-D17
uuuguaacuuaucugagagaggaugguuauuauaau

SEQ ID NO: 931 - RNA, 36 nt, Wolinella succinogenes; identical to SEQ ID NO: 859

SEQ ID NO: 932 - RNA, 36 nt, Campylobacter jejuni
auaauacaaaaaucauuuuuuuaaacaaacauaaac

SEQ ID NO: 933 - RNA, 36 nt, Campylobacter jejuni
uauaaucucauaagaaauuuaaaaagggacuaaaau

SEQ ID NO: 934 - RNA, 36 nt, Helicobacter mustelae
guauuugucaauaaauauacuuuauaauggcaagau

SEQ ID NO: 935 - RNA, 36 nt, Roseburia intestinalis
uuguaauaaccuaauuaucacuugguaugauauaau

SEQ ID NO: 936 - RNA, 36 nt, Lactobacillus coryniformis
uuuuauucuauaguaaguuuucagcuaaaauagauc

SEQ ID NO: 937 - RNA, 36 nt, Rhodopseudomonas palustris; identical to SEQ ID NO: 868

SEQ ID NO: 938 - RNA, 36 nt, Cand. Puniceispirillum marinum
uaaccauaggcuccucaaucaccagaguguuauugc

SEQ ID NO: 939 - RNA, 36 nt, Verminephrobacter eiseniae; identical to SEQ ID NO: 873

SEQ ID NO: 940 - RNA, 36 nt, Ralstonia syzygii
guuaguagcaaagcgcaauucccgaucugcuggaaa

SEQ ID NO: 941 - RNA, 36 nt, Azospirillum B510
uuaacggcuggacccccgauccccaucgaauuucca

SEQ ID NO: 942 - RNA, 36 nt, Dinoroseobacter shibae; identical to SEQ ID NO: 872

SEQ ID NO: 943 - RNA, 36 nt, Rhodospirillum rubrum; identical to SEQ ID NO: 870

SEQ ID NO: 944 - RNA, 36 nt, Rhodospirillum rubrum; identical to SEQ ID NO: 871

SEQ ID NO: 945 - RNA, 36 nt, Spirochaeta Buddy
auuagagauaaucgcugguuuuuguuaagauauaac

SEQ ID NO: 946 - RNA, 36 nt, Prevotella ruminicola; identical to SEQ ID NO: 862

SEQ ID NO: 947 - RNA, 36 nt, Flavobacterium columnare
agauaaaauuauucuaaucuuuaaucuuaucacaau

SEQ ID NO: 948 - RNA, 36 nt, Parvibaculum lavamentivorans
cuugcgaaaagcgaccgccucucgauuugcuacaga

SEQ ID NO: 949 - RNA, 44 nt, Capnocytophaga ochracea; identical to SEQ ID NO: 857

SEQ ID NO: 950 - RNA, 48 nt, Fibrobacter succinogenes; identical to SEQ ID NO: 863

SEQ ID NO: 951 - RNA, 36 nt, Nitratifractor salsuginis; identical to SEQ ID NO: 853

SEQ ID NO: 952 - RNA, 36 nt, Akkermansia muciniphila
cuuauacgggaacuccacgauaaggcauuuuacaug

SEQ ID NO: 953 - RNA, 88 nt, Artificial Sequence
  Synthetic sequence
uuggaaccauucaaaacagcauagcaaguuaaaauaaggcuaguccguuaucaacuugaaaaaguggcaccgagucggugcuuuuuuu

SEQ ID NO: 954 - RNA, 77 nt, Artificial Sequence
  Synthetic sequence
caaaacagcauagcaaguuaaaauaaggcuaguccguuaucaacuugaaaaaguggcaccgagucggugcuuuuuuu

SEQ ID NO: 955 - RNA, 61 nt, Artificial Sequence
  Synthetic sequence
caaaacagcauagcaaguuaaaauaaggcuaguccguuaucaacuugaaaaaguuuuuuuu

SEQ ID NO: 956 - RNA, 44 nt, Artificial Sequence
  Synthetic sequence
caaaacagcauagcaaguuaaaauaaggcuaguccguuuuuuuu

SEQ ID NO: 957 - RNA, 72 nt, Artificial Sequence
  Synthetic sequence
caaaacagcauagcaaguuaaaauaaggcuaguccgguucacugccguauaggcagcuaagaaauuuuuuuu

SEQ ID NO: 958 - RNA, 82 nt, Artificial Sequence
  Synthetic sequence
guuuuagagcuagaaauagcaaguuaaaauaaggcuaguccguuaucaacuugaaaaaguggcaccgagucggugcuuuuuu

SEQ ID NO: 959 - RNA, 102 nt, Artificial Sequence
  Synthetic sequence
  misc_feature (1)..(80): n is a, c, g, or u
nnnnnnnnnnnnnnnnnnnnnnnnnnnnnnnnnnnnnnnnnnnnnnnnnnnnnnnnnnnnnnnnnnnnnnnnnnnnnnnnguuuuagagcuaugcuguuuug

SEQ ID NO: 960 - RNA, 102 nt, Artificial Sequence
  Synthetic sequence
  misc_feature (1)..(80): n is a, c, g, or u
nnnnnnnnnnnnnnnnnnnnnnnnnnnnnnnnnnnnnnnnnnnnnnnnnnnnnnnnnnnnnnnnnnnnnnnnnnnnnnnnguuuuagagcuauguuauuuug

SEQ ID NO: 961 - RNA, 92 nt, exemplary
  misc_feature (1)..(80): n is a, c, g, or u
nnnnnnnnnnnnnnnnnnnnnnnnnnnnnnnnnnnnnnnnnnnnnnnnnnnnnnnnnnnnnnnnnnnnnnnnnnnnnnnnguuuuagagcua

SEQ ID NO: 962 - RNA, 152 nt, Artificial Sequence
  Synthetic sequence
  misc_feature (37)..(116): n is a, c, g, or u
guuuuagagcuaugcuguuuugaauggucccaaaacnnnnnnnnnnnnnnnnnnnnnnnnnnnnnnnnnnnnnnnnnnnnnnnnnnnnnnnnnnnnnnnnnnnnnnnnnnnnnnnnguuuuagagcuaugcuguuuugaauggucccaaaac

SEQ ID NO: 963 - RNA, 188 nt, Artificial Sequence
  Synthetic sequence
  misc_feature (37)..(116): n is a, c, g, or u
guuuuagagcuaugcuguuuugaauggucccaaaacnnnnnnnnnnnnnnnnnnnnnnnnnnnnnnnnnnnnnnnnnnnnnnnnnnnnnnnnnnnnnnnnnnnnnnnnnnnnnnnnguuuuagagcuaugcuguuuugaauggucccaaaacguuuuagagcuaugcuguuuugaauggucccaaaac

SEQ ID NO: 964 - RNA, 22 nt, Artificial Sequence
  synthetic sequence
guuuuagagcuaugcuguuuug

SEQ ID NO: 965 - RNA, 36 nt, Streptococcus pyogenes
guuuuagagcuaugcuguuuugaauggucccaaaac

SEQ ID NO: 966 - RNA, 36 nt, Pasteurella multocida
guuguaguucccucucucauuucgcagugcuacaau

SEQ ID NO: 967 - RNA, 36 nt, Mycoplasma mobile
guuuugguguaguaucauucuuauguauucuuaaac

SEQ ID NO: 968 - RNA, 37 nt, Francisella novicida
guuucaguugcugaauuauuugguaaacuacuguuag

SEQ ID NO: 969 - RNA, 33 nt, Francisella novicida
guuucaguugcugaauuauuugguaaacuacug

SEQ ID NO: 970 - RNA, 36 nt, Streptococcus mutans
guuuuagagcuguguuguuucgaaugguuccaaaac

SEQ ID NO: 971 - RNA, 36 nt, Streptococcus thermophilus; identical to SEQ ID NO: 970

SEQ ID NO: 972 - RNA, 36 nt, Streptococcus thermophilus
guuuuuguacucucaagauuuaaguaacuguacaac

SEQ ID NO: 973 - RNA, 36 nt, Listeria innocua
guuuuagagcuauguuauuuugaaugcuaacaaaac

SEQ ID NO: 974 - RNA, 36 nt, Treponema denticola
guuugagaguuguguaauuuaagauggaucucaaac

SEQ ID NO: 975 - RNA, 36 nt, Neisseria meningitidis
guuguagcucccuuucucauuucgcagugcuacaau

SEQ ID NO: 976 - RNA, 36 nt, Streptococcus gordonii; identical to SEQ ID NO: 972

SEQ ID NO: 977 - RNA, 35 nt, Bifidobacterium bifidum
guuucaaugccugucagaucaaugacuuugaccac

SEQ ID NO: 978 - RNA, 36 nt, Lactobacillus salivarius
guuucagaaguauguuaaaucaauaagguuaagacc

SEQ ID NO: 979 - RNA, 37 nt, Francisella novicida
cuaacaguaguuuaccaaauaauucagcaacugaaac

SEQ ID NO: 980 - RNA, 37 nt, Francisella novicida; identical to SEQ ID NO: 979

SEQ ID NO: 981 - RNA, 37 nt, Legionella pneumophila
ccaauaaucccucaucuaaaaauccaaccacugaaac

SEQ ID NO: 982 - RNA, 36 nt, Nitratifractor salsuginis
guuuuaagaccccucaaaaccccacccuguuacaau

SEQ ID NO: 983 - RNA, 36 nt, Butyrivibrio fibrisolvens
guuuuaguacccgggaaaauuaagugauuggaaaac

SEQ ID NO: 984 - RNA, 36 nt, Streptobacillus moniliformis
gauacagauucuugguaaauuugaauaaugugaaug

SEQ ID NO: 985 - RNA, 36 nt, Mycoplasma mobile; identical to SEQ ID NO: 967

SEQ ID NO: 986 - RNA, 44 nt, Capnocytophaga ochracea
uguuaucaaucgcaaaacuacaaaauuugaaagcaauucacaac

SEQ ID NO: 987 - RNA, 36 nt, Acidovorax ebreus
aguguagcuauccggggugagagagggagcuacaac

SEQ ID NO: 988 - RNA, 36 nt, Wolinella succinogenes
auuauagcgaggaauggcugaguaggcggcuauaac

SEQ ID NO: 989 - RNA, 37 nt, Wolinella succinogenes
gcaacacuuuauagcaaauccgcuuagccugugaaac

SEQ ID NO: 990 - RNA, 37 nt, Wolinella succinogenes; identical to SEQ ID NO: 989

SEQ ID NO: 991 - RNA, 36 nt, Prevotella ruminicola
guugugguuugauguaggaaaggaaugauauacaac

SEQ ID NO: 992 - RNA, 48 nt, Fibrobacter succinogenes
guuguuauugcacuaguaaaacuagaaaaucugaaagcaauucacaac

SEQ ID NO: 993 - RNA, 36 nt, Campylobacter jejuni
auuuuaccauaaagaaauuuaaaaagggacuaaaac

SEQ ID NO: 994 - RNA, 36 nt, Campylobacter jejuni
guuuuagucccuuuuuaaauuucuuuaugguaaaau

SEQ ID NO: 995 - RNA, 36 nt, Pasteurella multocida
auuguagcacugcgaaaugagagagggaacuacaac

SEQ ID NO: 996 - RNA, 36 nt, Rhodopseudomonas palustris
agccuaccacggggaaaucgguagggaagccacggc

SEQ ID NO: 997 - RNA, 36 nt, Olsenella uli
guuuuggggcagugucguuuugacugguaaucaaac

SEQ ID NO: 998 - RNA, 36 nt, Rhodospirillum rubrum
acucuaccauggcggugugggacggggccauggaac

SEQ ID NO: 999 - RNA, 36 nt, Rhodospirillum rubrum; identical to SEQ ID NO: 998

SEQ ID NO: 1000 - RNA, 36 nt, Dinoroseobacter shibae
aguuuagcuguucagaauucgggguccagccgcaac

SEQ ID NO: 1001 - RNA, 36 nt, Verminephrobacter eiseniae
auuguagcucacugggauaugcgcacuggccggaac

SEQ ID NO: 1002 - RNA, 37 nt, Francisella novicida; identical to SEQ ID NO: 968

SEQ ID NO: 1003 - RNA, 37 nt, Francisella novicida; identical to SEQ ID NO: 968

SEQ ID NO: 1004 - RNA, 37 nt, Wolinella succinogenes; identical to SEQ ID NO: 989

SEQ ID NO: 1005 - RNA, 37 nt, Wolinella succinogenes; identical to SEQ ID NO: 989

SEQ ID NO: 1006 - RNA, 37 nt, gamma proteobacterium
guuucagagcuuaucccaacaaaccaacagcugaaac

SEQ ID NO: 1007 - RNA, 37 nt, gamma proteobacterium; identical to SEQ ID NO: 1006

SEQ ID NO: 1008 - RNA, 37 nt, Sutterella wadsworthensis
gcgaagaucauaacgcuacgagcuauagcacugaaac

SEQ ID NO: 1009 - RNA, 37 nt, Sutterella wadsworthensis; identical to SEQ ID NO: 1008

SEQ ID NO: 1010 - RNA, 37 nt, Legionella pneumophila; identical to SEQ ID NO: 981

SEQ ID NO: 1011 - RNA, 36 nt, Listeria innocua; identical to SEQ ID NO: 973

SEQ ID NO: 1012 - RNA, 36 nt, Streptococcus thermophilus; identical to SEQ ID NO: 970

SEQ ID NO: 1013 - RNA, 36 nt, Streptococcus mutans; identical to SEQ ID NO: 970

SEQ ID NO: 1014 - RNA, 36 nt, Streptococcus pyogenes; identical to SEQ ID NO: 965

SEQ ID NO: 1015 - RNA, 36 nt, Fusobacterium nucleatum
guuugagaguaauguuauuuuaaauagauucaaaac

SEQ ID NO: 1016 - RNA, 36 nt, Filifactor alocis
guuugagaguaguguaauuucauaugguagucaaac

SEQ ID NO: 1017 - RNA, 36 nt, Treponema denticola; identical to SEQ ID NO: 974

SEQ ID NO: 1018 - RNA, 36 nt, Solobacterium moorei
guuugagaacuauguaaauuaugcugguagcaaaac

SEQ ID NO: 1019 - RNA, 36 nt, Veillonella atypica
guuugcgaguaguguaauucuguaaaucucuaaaac

SEQ ID NO: 1020 - RNA, 36 nt, Finegoldia magna
guuugagaaugauguaauuucauauagguauuaaac

SEQ ID NO: 1021 - RNA, 36 nt, Olsenella uli; identical to SEQ ID NO: 997

SEQ ID NO: 1022 - RNA, 36 nt, Lactobacillus rhamnosus
gucucagguagaugucagaucaaucaguucaagagc

SEQ ID NO: 1023 - RNA, 36 nt, Lactobacillus gasseri
guuuuagaugguuguuagaucaauaagguuuagauc

SEQ ID NO: 1024 - RNA, 36 nt, Lactobacillus gasseri; identical to SEQ ID NO: 1023

SEQ ID NO: 1025 - RNA, 36 nt, Oenococcus kitaharae
gcuucagaugugugucagaucaaugagguagaaccc

SEQ ID NO: 1026 - RNA, 36 nt, Bifidobacterium bifidum
guuucagaugccugucagaucaaugacuuugaccac

SEQ ID NO: 1027 - RNA, 36 nt, Staphylococcus pseudintermedius
guuuuagcacuauguuuauuuagaaagagguaaaac

SEQ ID NO: 1028 - RNA, 36 nt, Eubacterium rectale
auuuuaguaacugaauaauuuacgugacuguaaaac

SEQ ID NO: 1029 - RNA, 36 nt, Enterococcus faecalis
guuuuuguauucucaauaauuucuuaucaguaaaac

SEQ ID NO: 1030 - RNA, 36 nt, Streptococcus thermophilus; identical to SEQ ID NO: 972

SEQ ID NO: 1031 - RNA, 36 nt, Staphylococcus lugdunensis
guuuuaguacucuguaauuuuagguauaagugauac

SEQ ID NO: 1032 - RNA, 36 nt, Eubacterium dolichum
guuuuguuaccauauggauuuuugcuagauuaagac

SEQ ID NO: 1033 - RNA, 36 nt, Mycoplasma mobile; identical to SEQ ID NO: 967

SEQ ID NO: 1034 - RNA, 36 nt, Mycoplasma ovipneumoniae
guuuuugugcuguacaauuucuuacuagaguaaaac

SEQ ID NO: 1035 - RNA, 36 nt, Mycoplasma gallisepticum
guuuuagcacuguacaauacuuguguaagcaauaac

SEQ ID NO: 1036 - RNA, 36 nt, Mycoplasma canis
guuuuaguguuguacaauauuuggguaaacaauaac

SEQ ID NO: 1037 - RNA, 36 nt, Mycoplasma synoviae
guuuugggguuguacaauuauuuuguuaaguaaaac

SEQ ID NO: 1038 - RNA, 36 nt, Aminomonas paucivorans
agcauagcauuucggagugcggcagggagcuaugac

SEQ ID NO: 1039 - RNA, 36 nt, Clostridium perfringens
auuauagcauaucgagaauuuacuaggaacuauaac

SEQ ID NO: 1040 - RNA, 36 nt, Clostridium cellulolyticum
auuauagcauaucggagccugaauuggagcuauaac

SEQ ID NO: 1041 - RNA, 36 nt, Acidovorax ebreus; identical to SEQ ID NO: 987

SEQ ID NO: 1042 - RNA, 36 nt, Neisseria meningitidis; identical to SEQ ID NO: 975

SEQ ID NO: 1043 - RNA, 36 nt, Pasteurella multocida; identical to SEQ ID NO: 966

SEQ ID NO: 1044 - RNA, 36 nt, phylotype Rs-D17
guuauaguuuccuuccucucucagaugugcuauaau

SEQ ID NO: 1045 - RNA, 36 nt, Wolinella succinogenes; identical to SEQ ID NO: 988

SEQ ID NO: 1046 - RNA, 36 nt, Campylobacter jejuni; identical to SEQ ID NO: 994

SEQ ID NO: 1047 - RNA, 36 nt, Campylobacter jejuni; identical to SEQ ID NO: 994

SEQ ID NO: 1048 - RNA, 36 nt, Helicobacter mustelae
auuuuagcauaaacauauuuaugaaguggcuaaaac

SEQ ID NO: 1049 - RNA, 36 nt, Roseburia intestinalis
auuauaccauaccaagugauaacagggaauuacaac

SEQ ID NO: 1050 - RNA, 36 nt, Lactobacillus coryniformis
gaucuauuuuagcugaaaacugaaggaaucaauagc

SEQ ID NO: 1051 - RNA, 36 nt, Rhodopseudomonas palustris; identical to SEQ ID NO: 996

SEQ ID NO: 1052 - RNA, 36 nt, Cand. Puniceispirillum marinum
aguauagcacucuggugauugagagccuagagcaac

SEQ ID NO: 1053 - RNA, 36 nt, Verminephrobacter eiseniae; identical to SEQ ID NO: 1001

SEQ ID NO: 1054 - RNA, 36 nt, Ralstonia syzygii
agguuagcagaucgggaauugcgcucuggcuacaac

SEQ ID NO: 1055 - RNA, 36 nt, Azospirillum B510
aguguagccgauggggaucggggguccagccgcaac

SEQ ID NO: 1056 - RNA, 36 nt, Dinoroseobacter shibae; identical to SEQ ID NO: 1000

SEQ ID NO: 1057 - RNA, 36 nt, Rhodospirillum rubrum; identical to SEQ ID NO: 998

SEQ ID NO: 1058 - RNA, 36 nt, Rhodospirillum rubrum; identical to SEQ ID NO: 998

SEQ ID NO: 1059 - RNA, 36 nt, Spirochaeta Buddy
ggucaaucuuaacaaaaaucagcggucauccccaac

SEQ ID NO: 1060 - RNA, 36 nt, Prevotella ruminicola; identical to SEQ ID NO: 991

SEQ ID NO: 1061 - RNA, 36 nt, Flavobacterium columnare
guugugguuugauuaaagauuagaaaacacgauauu

SEQ ID NO: 1062 - RNA, 36 nt, Parvibaculum lavamentivorans
agaguagcaaaucgagagacggccgcaauccgcagc

SEQ ID NO: 1063 - RNA, 44 nt, Capnocytophaga ochracea; identical to SEQ ID NO: 986

SEQ ID NO: 1064 - RNA, 48 nt, Fibrobacter succinogenes; identical to SEQ ID NO: 992

SEQ ID NO: 1065 - RNA, 36 nt, Nitratifractor salsuginis; identical to SEQ ID NO: 982

SEQ ID NO: 1066 - RNA, 36 nt, Akkermansia muciniphila
guuguacugugccuuauuuuggauucaaggcaaaac

SEQ ID NO: 1067 - RNA, 44 nt, Artificial Sequence
  Synthetic sequence
guuuuagagcuagaaauagcaaguuaaaauaaggcuaguccguu

SEQ ID NO: 1068 - RNA, 60 nt, Artificial Sequence
  Synthetic sequence
  misc_feature (13)..(17): n is a, c, g, or u
guuuuagagcuannnnnuagcaaguuaaaauaaguuaaaauaaggcuaguccguuaucaa

SEQ ID NO: 1069 - RNA, 68 nt, Artificial Sequence
  Synthetic sequence
guuuuagagcuaugcugaaaagcauagcaaguuaaaaauaaguuaaaauaaggcuaguccguuaucaa

SEQ ID NO: 1070 - RNA, 69 nt, Artificial Sequence
  Synthetic sequence
guuuuagagcuaugcuguuuuggaaacaaaacagcauagcaaguuaaaauaaggcuaguccguuaucaa

SEQ ID NO: 1071 - RNA, 70 nt, Artificial Sequence
  Synthetic sequence
guuuuagagcuaguuuuagagcuagaaauagcaaguuaaaauuagcaaguuaaaauaaggcuaguccguu

SEQ ID NO: 1072 - RNA, 70 nt, Artificial Sequence
  Synthetic sequence
guuuuagagcuauagcaaguuaaaaugaaaguuuuagagcuauagcaaguuaaaauaaggcuaguccguu

SEQ ID NO: 1073 - RNA, 74 nt, Artificial Sequence
  Synthetic sequence
guuuuagagcuagaaauagcaaguuaaaauguuuuagagcuagaaauagcaaguuaaaauaaggcuaguccguu

SEQ ID NO: 1074 - RNA, 119 nt, Artificial Sequence
  Synthetic sequence
guuuuagagcuaugcuguuuuggaaacaaaacagcauagcaaguuaaaauguuuuagagcuaugcuguuuuggaaacaaaacagcauagcaaguuaaaauaaggcuaguccguuaucaa

SEQ ID NO: 1075 - RNA, 12 nt, Artificial Sequence
  Synthetic sequence
guuuuagagcua

SEQ ID NO: 1076 - protein, 11 aa, Artificial Sequence
  Synthetic sequence
YGRKKRRQRRR

SEQ ID NO: 1077 - protein, 12 aa, Artificial Sequence
  Synthetic sequence
RRQRRTSKLMKR

SEQ ID NO: 1078 - protein, 27 aa, Artificial Sequence
  Synthetic sequence
GWTLNSAGYLLGKINLKALAALAKKIL

SEQ ID NO: 1079 - protein, 33 aa, Artificial Sequence
  Synthetic sequence
KALAWEAKLAKALAKALAKHLAKALAKALKCEA

SEQ ID NO: 1080 - protein, 16 aa, Artificial Sequence
  Synthetic sequence
RQIKIWFQNRRMKWKK

SEQ ID NO: 1081 - protein, 11 aa, Artificial Sequence
  Synthetic sequence
YGRKKRRQRRR

SEQ ID NO: 1082 - protein, 9 aa, Artificial Sequence
  Synthetic sequence
RKKRRQRRR

SEQ ID NO: 1083 - protein, 11 aa, Artificial Sequence
  Synthetic sequence
YGRKKRRQRRR

SEQ ID NO: 1084 - protein, 8 aa, Artificial Sequence
  Synthetic sequence
RKKRRQRR

SEQ ID NO: 1085 - protein, 11 aa, Artificial Sequence
  Synthetic sequence
YARAAARQARA

SEQ ID NO: 1086 - protein, 11 aa, Artificial Sequence
  Synthetic sequence
THRLPRRRRRR

SEQ ID NO: 1087 - protein, 11 aa, Artificial Sequence
  Synthetic sequence
GGRRARRRRRR

SEQ ID NO: 1088 - protein, 1300 aa, Francisella  tularensis
MSIYQEFVNKYSLSKTLRFELIPQGKTLENIKARGLILDDEKRAKDYKKAKQIIDKYHQFFIEEILSSVCISEDLLQNYSDVYFKLKKSDDDNLQKDFKSAKDTIKKQISEYIKDSEKFKNLFNQNLIDAKKGQESDLILWLKQSKDNGIELFKANSDITDIDEALEIIKSFKGWTTYFKGFHENRKNVYSSNDIPTSIIYRIVDDNLPKFLENKAKYESLKDKAPEAINYEQIKKDLAEELTFDIDYKTSEVNQRVFSLDEVFEIANFNNYLNQSGITKFNTIIGGKFVNGENTKRKGINEYINLYSQQINDKTLKKYKMSVLFKQILSDTESKSFVIDKLEDDSDVVTTMQSFYEQIAAFKTVEEKSIKETLSLLFDDLKAQKLDLSKIYFKNDKSLTDLSQQVFDDYSVIGTAVLEYITQQIAPKNLDNPSKKEQELIAKKTEKAKYLSLETIKLALEEFNKHRDIDKQCRFEEILANFAAIPMIFDEIAQNKDNLAQISIKYQNQGKKDLLQASAEDDVKAIKDLLDQTNNLLHKLKIFHISQSEDKANILDKDEHFYLVFEECYFELANIVPLYNKIRNYITQKPYSDEKFKLNFENSTLANGWDKNKEPDNTAILFIKDDKYYLGVMNKKNNKIFDDKAIKENKGEGYKKIVYKLLPGANKMLPKVFFSAKSIKFYNPSEDILRIRNHSTHTKNGSPQKGYEKFEFNIEDCRKFIDFYKQSISKHPEWKDFGFRFSDTQRYNSIDEFYREVENQGYKLTFENISESYIDSVVNQGKLYLFQIYNKDFSAYSKGRPNLHTLYWKALFDERNLQDVVYKLNGEAELFYRKQSIPKKITHPAKEAIANKNKDNPKKESVFEYDLIKDKRFTEDKFFFHCPITINFKSSGANKFNDEINLLLKEKANDVHILSIDRGERHLAYYTLVDGKGNIIKQDTFNIIGNDRMKTNYHDKLAAIEKDRDSARKDWKKINNIKEMKEGYLSQVVHEIAKLVIEYNAIVVFEDLNFGFKRGRFKVEKQVYQKLEKMLIEKLNYLVFKDNEFDKTGGVLRAYQLTAPFETFKKMGKQTGIIYYVPAGFTSKICPVTGFVNQLYPKYESVSKSQEFFSKFDKICYNLDKGYFEFSFDYKNFGDKAAKGKWTIASFGSRLINFRNSDKNHNWDTREVYPTKELEKLLKDYSIEYGHGECIKAAICGESDKKFFAKLTSVLNTILQMRNSKTGTELDYLISPVADVNGNFFDSRQAPKNMPQDADANGAYHIGLKGLMLLGRIKNNQEGKKLNLVIKNEEYFEFVQNRNN

SEQ ID NO: 1089 - protein, 1307 aa, unknown
  Synthetic sequence
MTQFEGFTNLYQVSKTLRFELIPQGKTLKHIQEQGFIEEDKARNDHYKELKPIIDRIYKTYADQCLQLVQLDWENLSAAIDSYRKEKTEETRNALIEEQATYRNAIHDYFIGRTDNLTDAINKRHAEIYKGLFKAELFNGKVLKQLGTVTTTEHENALLRSFDKFTTYFSGFYENRKNVFSAEDISTAIPHRIVQDNFPKFKENCHIFTRLITAVPSLREHFENVKKAIGIFVSTSIEEVFSFPFYNQLLTQTQIDLYNQLLGGISREAGTEKIKGLNEVLNLAIQKNDETAHIIASLPHRFIPLFKQILSDRNTLSFILEEFKSDEEVIQSFCKYKTLLRNENVLETAEALFNELNSIDLTHIFISHKKLETISSALCDHWDTLRNALYERRISELTGKITKSAKEKVQRSLKHEDINLQEIISAAGKELSEAFKQKTSEILSHAHAALDQPLPTTLKKQEEKEILKSQLDSLLGLYHLLDWFAVDESNEVDPEFSARLTGIKLEMEPSLSFYNKARNYATKKPYSVEKFKLNFQMPTLASGWDVNKEKNNGAILFVKNGLYYLGIMPKQKGRYKALSFEPTEKTSEGFDKMYYDYFPDAAKMIPKCSTQLKAVTAHFQTHTTPILLSNNFIEPLEITKEIYDLNNPEKEPKKFQTAYAKKTGDQKGYREALCKWIDFTRDFLSKYTKTTSIDLSSLRPSSQYKDLGEYYAELNPLLYHISFQRIAEKEIMDAVETGKLYLFQIYNKDFAKGHHGKPNLHTLYWTGLFSPENLAKTSIKLNGQAELFYRPKSRMKRMAHRLGEKMLNKKLKDQKTPIPDTLYQELYDYVNHRLSHDLSDEARALLPNVITKEVSHEIIKDRRFTSDKFFFHVPITLNYQAANSPSKFNQRVNAYLKEHPETPIIGIDRGERNLIYITVIDSTGKILEQRSLNTIQQFDYQKKLDNREKERVAARQAWSVVGTIKDLKQGYLSQVIHEIVDLMIHYQAVVVLENLNFGFKSKRTGIAEKAVYQQFEKMLIDKLNCLVLKDYPAEKVGGVLNPYQLTDQFTSFAKMGTQSGFLFYVPAPYTSKIDPLTGFVDPFVWKTIKNHESRKHFLEGFDFLHYDVKTGDFILHFKMNRNLSFQRGLPGFMPAWDIVFEKNETQFDAKGTPFIAGKRIVPVIENHRFTGRYRDLYPANELIALLEEKGIVFRDGSNILPKLLENDDSHAIDTMVALIRSVLQMRNSNAATGEDYINSPVRDLNGVCFDSRFQNPEWPMDADANGAYHIALKGQLLLNHLKESKDLKLQNGISNQDWLAYIQELRN

SEQ ID NO: 1090 - protein, 1246 aa, unknown
  Synthetic sequence
MLKNVGIDRLDVEKGRKNMSKLEKFTNCYSLSKTLRFKAIPVGKTQENIDNKRLLVEDEKRAEDYKGVKKLLDRYYLSFINDVLHSIKLKNLNNYISLFRKKTRTEKENKELENLEINLRKEIAKAFKGNEGYKSLFKKDIIETILPEFLDDKDEIALVNSFNGFTTAFTGFFDNRENMFSEEAKSTSIAFRCINENLTRYISNMDIFEKVDAIFDKHEVQEIKEKILNSDYDVEDFFEGEFFNFVLTQEGIDVYNAIIGGFVTESGEKIKGLNEYINLYNQKTKQKLPKFKPLYKQVLSDRESLSFYGEGYTSDEEVLEVFRNTLNKNSEIFSSIKKLEKLFKNFDEYSSAGIFVKNGPAISTISKDIFGEWNVIRDKWNAEYDDIHLKKKAVVTEKYEDDRRKSFKKIGSFSLEQLQEYADADLSVVEKLKEIIIQKVDEIYKVYGSSEKLFDADFVLEKSLKKNDAVVAIMKDLLDSVKSFENYIKAFFGEGKETNRDESFYGDFVLAYDILLKVDHIYDAIRNYVTQKPYSKDKFKLYFQNPQFMGGWDKDKETDYRATILRYGSKYYLAIMDKKYAKCLQKIDKDDVNGNYEKINYKLLPGPNKMLPKVFFSKKWMAYYNPSEDIQKIYKNGTFKKGDMFNLNDCHKLIDFFKDSISRYPKWSNAYDFNFSETEKYKDIAGFYREVEEQGYKVSFESASKKEVDKLVEEGKLYMFQIYNKDFSDKSHGTPNLHTMYFKLLFDENNHGQIRLSGGAELFMRRASLKKEELVVHPANSPIANKNPDNPKKTTTLSYDVYKDKRFSEDQYELHIPIAINKCPKNIFKINTEVRVLLKHDDNPYVIGIDRGERNLLYIVVVDGKGNIVEQYSLNEIINNFNGIRIKTDYHSLLDKKEKERFEARQNWTSIENIKELKAGYISQVVHKICELVEKYDAVIALEDLNSGFKNSRVKVEKQVYQKFEKMLIDKLNYMVDKKSNPCATGGALKGYQITNKFESFKSMSTQNGFIFYIPAWLTSKIDPSTGFVNLLKTKYTSIADSKKFISSFDRIMYVPEEDLFEFALDYKNFSRTDADYIKKWKLYSYGNRIRIFRNPKKNNVFDWEEVCLTSAYKELFNKYGINYQQGDIRALLCEQSDKAFYSSFMALMSLMLQMRNSITGRTDVDFLISPVKNSDGIFYDSRNYEAQENAILPKNADANGAYNIARKVLWAIGQFKKAEDEKLDKVKIAISNKEWLEYAQTSVKH

SEQ ID NO: 1091 - protein, 1246 aa, Porphyromonas macacae
MKTQHFFEDFTSLYSLSKTIRFELKPIGKTLENIKKNGLIRRDEQRLDDYEKLKKVIDEYHEDFIANILSSFSFSEEILQSYIQNLSESEARAKIEKTMRDTLAKAFSEDERYKSIFKKELVKKDIPVWCPAYKSLCKKFDNFTTSLVPFHENRKNLYTSNEITASIPYRIVHVNLPKFIQNIEALCELQKKMGADLYLEMMENLRNVWPSFVKTPDDLCNLKTYNHLMVQSSISEYNRFVGGYSTEDGTKHQGINEWINIYRQRNKEMRLPGLVFLHKQILAKVDSSSFISDTLENDDQVFCVLRQFRKLFWNTVSSKEDDAASLKDLFCGLSGYDPEAIYVSDAHLATISKNIFDRWNYISDAIRRKTEVLMPRKKESVERYAEKISKQIKKRQSYSLAELDDLLAHYSEESLPAGFSLLSYFTSLGGQKYLVSDGEVILYEEGSNIWDEVLIAFRDLQVILDKDFTEKKLGKDEEAVSVIKKALDSALRLRKFFDLLSGTGAEIRRDSSFYALYTDRMDKLKGLLKMYDKVRNYLTKKPYSIEKFKLHFDNPSLLSGWDKNKELNNLSVIFRQNGYYYLGIMTPKGKNLFKTLPKLGAEEMFYEKMEYKQIAEPMLMLPKVFFPKKTKPAFAPDQSVVDIYNKKTFKTGQKGFNKKDLYRLIDFYKEALTVHEWKLFNFSFSPTEQYRNIGEFFDEVREQAYKVSMVNVPASYIDEAVENGKLYLFQIYNKDFSPYSKGIPNLHTLYWKALFSEQNQSRVYKLCGGGELFYRKASLHMQDTTVHPKGISIHKKNLNKKGETSLFNYDLVKDKRFTEDKFFFHVPISINYKNKKITNVNQMVRDYIAQNDDLQIIGIDRGERNLLYISRIDTRGNLLEQFSLNVIESDKGDLRTDYQKILGDREQERLRRRQEWKSIESIKDLKDGYMSQVVHKICNMVVEHKAIVVLENLNLSFMKGRKKVEKSVYEKFERMLVDKLNYLVVDKKNLSNEPGGLYAAYQLTNPLFSFEELHRYPQSGILFFVDPWNTSLTDPSTGFVNLLGRINYTNVGDARKFFDRFNAIRYDGKGNILFDLDLSRFDVRVETQRKLWTLTTFGSRIAKSKKSGKWMVERIENLSLCFLELFEQFNIGYRVEKDLKKAILSQDRKEFYVRLIYLFNLMMQIRNSDGEEDYILSPALNEKNLQFDSRLIEAKDLPVDADANGAYNVARKGLMVVQRIKRGDHESIHRIGRAQWLRYVQEGIVE

SEQ ID NO: 1092 - protein, 1326 aa, Prevotella  disiens
MKVMENYQEFTNLFQLNKTLRFELKPIGKTCELLEEGKIFASGSFLEKDKVRADNVSYVKKEIDKKHKIFIEETLSSFSISNDLLKQYFDCYNELKAFKKDCKSDEEEVKKTALRNKCTSIQRAMREAISQAFLKSPQKKLLAIKNLIENVFKADENVQHFSEFTSYFSGFETNRENFYSDEEKSTSIAYRLVHDNLPIFIKNIYIFEKLKEQFDAKTLSEIFENYKLYVAGSSLDEVFSLEYFNNTLTQKGIDNYNAVIGKIVKEDKQEIQGLNEHINLYNQKHKDRRLPFFISLKKQILSDREALSWLPDMFKNDSEVIKALKGFYIEDGFENNVLTPLATLLSSLDKYNLNGIFIRNNEALSSLSQNVYRNFSIDEAIDANAELQTFNNYELIANALRAKIKKETKQGRKSFEKYEEYIDKKVKAIDSLSIQEINELVENYVSEFNSNSGNMPRKVEDYFSLMRKGDFGSNDLIENIKTKLSAAEKLLGTKYQETAKDIFKKDENSKLIKELLDATKQFQHFIKPLLGTGEEADRDLVFYGDFLPLYEKFEELTLLYNKVRNRLTQKPYSKDKIRLCFNKPKLMTGWVDSKTEKSDNGTQYGGYLFRKKNEIGEYDYFLGISSKAQLFRKNEAVIGDYERLDYYQPKANTIYGSAYEGENSYKEDKKRLNKVIIAYIEQIKQTNIKKSIIESISKYPNISDDDKVTPSSLLEKIKKVSIDSYNGILSFKSFQSVNKEVIDNLLKTISPLKNKAEFLDLINKDYQIFTEVQAVIDEICKQKTFIYFPISNVELEKEMGDKDKPLCLFQISNKDLSFAKTFSANLRKKRGAENLHTMLFKALMEGNQDNLDLGSGAIFYRAKSLDGNKPTHPANEAIKCRNVANKDKVSLFTYDIYKNRRYMENKFLFHLSIVQNYKAANDSAQLNSSATEYIRKADDLHIIGIDRGERNLLYYSVIDMKGNIVEQDSLNIIRNNDLETDYHDLLDKREKERKANRQNWEAVEGIKDLKKGYLSQAVHQIAQLMLKYNAIIALEDLGQMFVTRGQKIEKAVYQQFEKSLVDKLSYLVDKKRPYNELGGILKAYQLASSITKNNSDKQNGFLFYVPAWNTSKIDPVTGFTDLLRPKAMTIKEAQDFFGAFDNISYNDKGYFEFETNYDKFKIRMKSAQTRWTICTFGNRIKRKKDKNYWNYEEVELTEEFKKLFKDSNIDYENCNLKEEIQNKDNRKFFDDLIKLLQLTLQMRNSDDKGNDYIISPVANAEGQFFDSRNGDKKLPLDADANGAYNIARKGLWNIRQIKQTKNDKKLNLSISSTEWLDFVREKPYLK

SEQ ID NO: 1093 - RNA, 19 nt, Artificial Sequence
  Synthetic sequence
aauuucuacuguuguagau

SEQ ID NO: 1094 - RNA, 19 nt, Artificial Sequence
  Synthetic sequence
aauuucugcuguugcagau

SEQ ID NO: 1095 - RNA, 19 nt, Artificial Sequence
  Synthetic sequence
aauuuccacuguuguggau

SEQ ID NO: 1096 - RNA, 19 nt, Artificial Sequence
  Synthetic sequence
aauuccuacuguuguaggu

SEQ ID NO: 1097 - RNA, 19 nt, Artificial Sequence
  Synthetic sequence
aauuucuacuauuguagau

SEQ ID NO: 1098 - RNA, 19 nt, Artificial Sequence
  Synthetic sequence
aauuucuacugcuguagau

SEQ ID NO: 1099 - RNA, 18 nt, Artificial Sequence
  Synthetic sequence
aauuucuacuuuguagau

SEQ ID NO: 1100 - RNA, 17 nt, Artificial Sequence
  Synthetic sequence
aauuucuacuuguagau

SEQ ID NO: 1101 - RNA, 67 nt, Artificial Sequence
  Synthetic sequence
gaauuuuucaacgggugugccaauggccacuuuccagguggcaaagcccguugagcuucucaaaaag

SEQ ID NO: 1102 - RNA, 79 nt, Artificial Sequence
  Synthetic sequence
gucuagaggacagaauuuuucaacgggugugccaauggccacuuuccagguggcaaagcccguugagcuucucaaaaag

SEQ ID NO: 1103 - RNA, 78 nt, Artificial Sequence
  Synthetic sequence
ucuagaggacagaauuuuucaacgggugugccaauggccacuuuccagguggcaaagcccguugagcuucucaaaaag

SEQ ID NO: 1104 - RNA, 36 nt, Artificial Sequence
  Synthetic sequence
acuuuccaggcaaagcccguugagcuucucaaaaag

SEQ ID NO: 1105 - RNA, 9 nt, Artificial Sequence
  Synthetic sequence
agcuucuca

SEQ ID NO: 1106 - RNA, 8 nt, Artificial Sequence
  Synthetic sequence
gcuucuca

SEQ ID NO: 1107 - RNA, 34 nt, Artificial Sequence
  Synthetic sequence
  misc_feature (15)..(34): n is a, c, g, or u
cugagaaguggcacnnnnnnnnnnnnnnnnnnnn

SEQ ID NO: 1108 - RNA, 14 nt, Artificial Sequence
  Synthetic sequence
cugagaaguggcac

SEQ ID NO: 1109 - RNA, 9 nt, Artificial Sequence
  Synthetic sequence
cugagaagu

SEQ ID NO: 1110 - RNA, 13 nt, Artificial Sequence
  Synthetic sequence
ugagaaguggcac

SEQ ID NO: 1111 - RNA, 8 nt, Artificial Sequence
  Synthetic sequence
ugagaagu

SEQ ID NO: 1112 - protein, 1129 aa, Alicyclobacillus acidoterrestris
MAVKSIKVKLRLDDMPEIRAGLWKLHKEVNAGVRYYTEWLSLLRQENLYRRSPNGDGEQECDKTAEECKAELLERLRARQVENGHRGPAGSDDELLQLARQLYELLVPQAIGAKGDAQQIARKFLSPLADKDAVGGLGIAKAGNKPRWVRMREAGEPGWEEEKEKAETRKSADRTADVLRALADFGLKPLMRVYTDSEMSSVEWKPLRKGQAVRTWDRDMFQQAIERMMSWESWNQRVGQEYAKLVEQKNRFEQKNFVGQEHLVHLVNQLQQDMKEASPGLESKEQTAHYVTGRALRGSDKVFEKWGKLAPDAPFDLYDAEIKNVQRRNTRRFGSHDLFAKLAEPEYQALWREDASFLTRYAVYNSILRKLNHAKMFATFTLPDATAHPIWTRFDKLGGNLHQYTFLFNEFGERRHAIRFHKLLKVENGVAREVDDVTVPISMSEQLDNLLPRDPNEPIALYFRDYGAEQHFTGEFGGAKIQCRRDQLAHMHRRRGARDVYLNVSVRVQSQSEARGERRPPYAAVFRLVGDNHRAFVHFDKLSDYLAEHPDDGKLGSEGLLSGLRVMSVDLGLRTSASISVFRVARKDELKPNSKGRVPFFFPIKGNDNLVAVHERSQLLKLPGETESKDLRAIREERQRTLRQLRTQLAYLRLLVRCGSEDVGRRERSWAKLIEQPVDAANHMTPDWREAFENELQKLKSLHGICSDKEWMDAVYESVRRVWRHMGKQVRDWRKDVRSGERPKIRGYAKDVVGGNSIEQIEYLERQYKFLKSWSFFGKVSGQVIRAEKGSRFAITLREHIDHAKEDRLKKLADRIIMEALGYVYALDERGKGKWVAKYPPCQLILLEELSEYQFNNDRPPSENNQLMQWSHRGVFQELINQAQVHDLLVGTMYAAFSSRFDARTGAPGIRCRRVPARCTQEHNPEPFPWWLNKFVVEHTLDACPLRADDLIPTGEGEIFVSPFSAEEGDFHQIHADLNAAQNLQQRLWSDFDISQIRLRCDWGEVDGELVLIPRLTGKRTADSYSNKVFYTNTGVTYYERERGKKRRKVFAQEKLSEEEAELLVEADEAREKSVVLMRDPSGIINRGNWTRQKEFWSMVNQRIEGYLVKQIRSRVPLQDSACENTGDI

SEQ ID NO: 1113 - protein, 872 aa, Alicyclobacillus contaminans
MGFNTAELLRKVEEEMRKTSVGFDTDNPFAHRITRRAIRGWDRIAEAWRRLPPDAPESEYIEAFKDIQRKNPRKIGSEPLFKNLAAPGVRSELLNNPQVLITFAKYNELQRQLAKAKQFAQKTLPHPVFHPVWVRYDKLGGNLHHYQIEPAVHANDTHKVKFSSLLLPQEDGSYAEVKDVTVSLAPSLQFPTGLVHPKVTTPPRTGLVTVMDEEAGKPVVCYRDRGHDALVPVAFGGAKLQFNRAHLSAGYRKGVLSAGGGGSIYFNVTLDVQVPNERDVSKTFSFSRDRDLVSLKAEELKRYMETKPLGMPGVRVMSVDLGVRYGAAISVFEVKPFAEVRKDKLHYPITGCEGFVAEHERSVILKLPGEGVRTAGKQSERKQALAAIRAEMSILRKWLRVSQVTEEDRAKAVRGLLEDERGGGWTMDPGEDSDHQPLQQFLHEARLAVGELVNLVHLSPAEWERAVIERHRRLERITASHIRVFQTMRKVWGKRRNEDAAHTGGISLAHIEHLIQQRKLFIRWSTHARTYGEVRRLPKHEGFAKRLQKHTNHVKEDRIKKLADMIVMAARGYRFLDKRARWVKTRHAPCDLILFEDLSRYRFTMDRPPTENSQLMNWSHRELLKTVKMQAALFGIGVGTVPAAFTSRFDAQTGAPGLRCKRVTKQDKEKTPFWLIQFAEITGVNVTNVEPGQLIPVDGGEWFVSPKGPRAADGLKCVHADINAAHNLQRRFWIPRLPSVKCRRYVEAEGFAAVPSSTAFMKVHGKGAFVSVDGEFYEYQKGRRVAVNRADRTSSTLDEDEGDIGEEMLVSSNGAGEFVRMFYDESGYVGYGRWMDSKVFWGKVRQIVHRAIQDQVEKRAAARGENGATSSR

SEQ ID NO: 1114 - protein, 1149 aa, Desulfovibrio inopinatus
MPTRTINLKLVLGKNPENATLRRALFSTHRLVNQATKRIEEFLLLCRGEAYRTVDNEGKEAEIPRHAVQEEALAFAKAAQRHNGCISTYEDQEILDVLRQLYERLVPSVNENNEAGDAQAANAWVSPLMSAESEGGLSVYDKVLDPPPVWMKLKEEKAPGWEAASQIWIQSDEGQSLLNKPGSPPRWIRKLRSGQPWQDDFVSDQKKKQDELTKGNAPLIKQLKEMGLLPLVNPFFRHLLDPEGKGVSPWDRLAVRAAVAHFISWESWNHRTRAEYNSLKLRRDEFEAASDEFKDDFTLLRQYEAKRHSTLKSIALADDSNPYRIGVRSLRAWNRVREEWIDKGATEEQRVTILSKLQTQLRGKFGDPDLFNWLAQDRHVHLWSPRDSVTPLVRINAVDKVLRRRKPYALMTFAHPRFHPRWILYEAPGGSNLRQYALDCTENALHITLPLLVDDAHGTWIEKKIRVPLAPSGQIQDLTLEKLEKKKNRLYYRSGFQQFAGLAGGAEVLFHRPYMEHDERSEESLLERPGAVWFKLTLDVATQAPPNWLDGKGRVRTPPEVHHFKTALSNKSKHTRTLQPGLRVLSVDLGMRTFASCSVFELIEGKPETGRAFPVADERSMDSPNKLWAKHERSFKLTLPGETPSRKEEEERSIARAEIYALKRDIQRLKSLLRLGEEDNDNRRDALLEQFFKGWGEEDVVPGQAFPRSLFQGLGAAPFRSTPELWRQHCQTYYDKAEACLAKHISDWRKRTRPRPTSREMWYKTRSYHGGKSIWMLEYLDAVRKLLLSWSLRGRTYGAINRQDTARFGSLASRLLHHINSLKEDRIKTGADSIVQAARGYIPLPHGKGWEQRYEPCQLILFEDLARYRFRVDRPRRENSQLMQWNHRAIVAETTMQAELYGQIVENTAAGFSSRFHAATGAPGVRCRFLLERDFDNDLPKPYLLRELSWMLGNTKVESEEEKLRLLSEKIRPGSLVPWDGGEQFATLHPKRQTLCVIHADMNAAQNLQRRFFGRCGEAFRLVCQPHGDDVLRLASTPGARLLGALQQLENGQGAFELVRDMGSTSQMNRFVMKSLGKKKIKPLQDNNGDDELEDVLSVLPEEDDTGRITVFRDSSGIFFPCNVWIPAKQFWPAVRAMIWKVMASHSLG

SEQ ID NO: 1115 - protein, 1194 aa, Desulfonatronum thiodismutans
MVLGRKDDTAELRRALWTTHEHVNLAVAEVERVLLRCRGRSYWTLDRRGDPVHVPESQVAEDALAMAREAQRRNGWPVVGEDEEILLALRYLYEQIVPSCLLDDLGKPLKGDAQKIGTNYAGPLFDSDTCRRDEGKDVACCGPFHEVAGKYLGALPEWATPISKQEFDGKDASHLRFKATGGDDAFFRVSIEKANAWYEDPANQDALKNKAYNKDDWKKEKDKGISSWAVKYIQKQLQLGQDPRTEVRRKLWLELGLLPLFIPVFDKTMVGNLWNRLAVRLALAHLLSWESWNHRAVQDQALARAKRDELAALFLGMEDGFAGLREYELRRNESIKQHAFEPVDRPYVVSGRALRSWTRVREEWLRHGDTQESRKNICNRLQDRLRGKFGDPDVFHWLAEDGQEALWKERDCVTSFSLLNDADGLLEKRKGYALMTFADARLHPRWAMYEAPGGSNLRTYQIRKTENGLWADVVLLSPRNESAAVEEKTFNVRLAPSGQLSNVSFDQIQKGSKMVGRCRYQSANQQFEGLLGGAEILFDRKRIANEQHGATDLASKPGHVWFKLTLDVRPQAPQGWLDGKGRPALPPEAKHFKTALSNKSKFADQVRPGLRVLSVDLGVRSFAACSVFELVRGGPDQGTYFPAADGRTVDDPEKLWAKHERSFKITLPGENPSRKEEIARRAAMEELRSLNGDIRRLKAILRLSVLQEDDPRTEHLRLFMEAIVDDPAKSALNAELFKGFGDDRFRSTPDLWKQHCHFFHDKAEKVVAERFSRWRTETRPKSSSWQDWRERRGYAGGKSYWAVTYLEAVRGLILRWNMRGRTYGEVNRQDKKQFGTVASALLHHINQLKEDRIKTGADMIIQAARGFVPRKNGAGWVQVHEPCRLILFEDLARYRFRTDRSRRENSRLMRWSHREIVNEVGMQGELYGLHVDTTEAGFSSRYLASSGAPGVRCRHLVEEDFHDGLPGMHLVGELDWLLPKDKDRTANEARRLLGGMVRPGMLVPWDGGELFATLNAASQLHVIHADINAAQNLQRRFWGRCGEAIRIVCNQLSVDGSTRYEMAKAPKARLLGALQQLKNGDAPFHLTSIPNSQKPENSYVMTPTNAGKKYRAGPGEKSSGEEDELALDIVEQAEELAQGRKTFFRDPSGVFFAPDRWLPSEIYWSRIRRRIWQVTLERNSSGRQERAEMDEMPY

SEQ ID NO: 1116 - protein, 1132 aa, Tuberibacillus calidus
MATKSFILKMKTKNNPQLRLSLWKTHELFNFGVAYYMDLLSLFRQKDLYMHNDEDPDHPVVLKKEEIQERLWMKVRETQQKNGFHGEVSKDEVLETLRALYEELVPSAVGKSGEANQISNKYLYPLTDPASQSGKGTANSGRKPRWKKLKEAGDPSWKDAYEKWEKERQEDPKLKILAALQSFGLIPLFRPFTENDHKAVISVKWMPKSKNQSVRKFDKDMFNQAIERFLSWESWNEKVAEDYEKTVSIYESLQKELKGISTKAFEIMERVEKAYEAHLREITFSNSTYRIGNRAIRGWTEIVKKWMKLDPSAPQGNYLDVVKDYQRRHPRESGDFKLFELLSRPENQAAWREYPEFLPLYVKYRHAEQRMKTAKKQATFTLCDPIRHPLWVRYEERSGTNLNKYRLIMNEKEKVVQFDRLICLNADGHYEEQEDVTVPLAPSQQFDDQIKFSSEDTGKGKHNFSYYHKGINYELKGTLGGARIQFDREHLLRRQGVKAGNVGRIFLNVTLNIEPMQPFSRSGNLQTSVGKALKVYVDGYPKVVNFKPKELTEHIKESEKNTLTLGVESLPTGLRVMSVDLGQRQAAAISIFEVVSEKPDDNKLFYPVKDTDLFAVHRTSFNIKLPGEKRTERRMLEQQKRDQAIRDLSRKLKFLKNVLNMQKLEKTDEREKRVNRWIKDREREEENPVYVQEFEMISKVLYSPHSVWVDQLKSIHRKLEEQLGKEISKWRQSISQGRQGVYGISLKNIEDIEKTRRLLFRWSMRPENPGEVKQLQPGERFAIDQQNHLNHLKDDRIKKLANQIVMTALGYRYDGKRKKWIAKHPACQLVLFEDLSRYAFYDERSRLENRNLMRWSRREIPKQVAQIGGLYGLLVGEVGAQYSSRFHAKSGAPGIRCRVVKEHELYITEGGQKVRNQKFLDSLVENNIIEPDDARRLEPGDLIRDQGGDKFATLDERGELVITHADINAAQNLQKRFWTRTHGLYRIRCESREIKDAVVLVPSDKDQKEKMENLFGIGYLQPFKQENDVYKWVKGEKIKGKKTSSQSDDKELVSEILQEASVMADELKGNRKTLFRDPSGYVFPKDRWYTGGRYFGTLEHLLKRKLAERRLFDGGSSRRGLFNGTDSNTNVE

SEQ ID NO: 1117 - protein, 1108 aa, Bacillus thermoamylovorans
MATRSFILKIEPNEEVKKGLWKTHEVLNHGIAYYMNILKLIRQEAIYEHHEQDPKNPKKVSKAEIQAELWDFVLKMQKCNSFTHEVDKDVVFNILRELYEELVPSSVEKKGEANQLSNKFLYPLVDPNSQSGKGTASSGRKPRWYNLKIAGDPSWEEEKKKWEEDKKKDPLAKILGKLAEYGLIPLFIPFTDSNEPIVKEIKWMEKSRNQSVRRLDKDMFIQALERFLSWESWNLKVKEEYEKVEKEHKTLEERIKEDIQAFKSLEQYEKERQEQLLRDTLNTNEYRLSKRGLRGWREIIQKWLKMDENEPSEKYLEVFKDYQRKHPREAGDYSVYEFLSKKENHFIWRNHPEYPYLYATFCEIDKKKKDAKQQATFTLADPINHPLWVRFEERSGSNLNKYRILTEQLHTEKLKKKLTVQLDRLIYPTESGGWEEKGKVDIVLLPSRQFYNQIFLDIEEKGKHAFTYKDESIKFPLKGTLGGARVQFDRDHLRRYPHKVESGNVGRIYFNMTVNIEPTESPVSKSLKIHRDDFPKFVNFKPKELTEWIKDSKGKKLKSGIESLEIGLRVMSIDLGQRQAAAASIFEVVDQKPDIEGKLFFPIKGTELYAVHRASFNIKLPGETLVKSREVLRKAREDNLKLMNQKLNFLRNVLHFQQFEDITEREKRVTKWISRQENSDVPLVYQDELIQIRELMYKPYKDWVAFLKQLHKRLEVEIGKEVKHWRKSLSDGRKGLYGISLKNIDEIDRTRKFLLRWSLRPTEPGEVRRLEPGQRFAIDQLNHLNALKEDRLKKMANTIIMHALGYCYDVRKKKWQAKNPACQIILFEDLSNYNPYEERSRFENSKLMKWSRREIPRQVALQGEIYGLQVGEVGAQFSSRFHAKTGSPGIRCSVVTKEKLQDNRFFKNLQREGRLTLDKIAVLKEGDLYPDKGGEKFISLSKDRKLVTTHADINAAQNLQKRFWTRTHGFYKVYCKAYQVDGQTVYIPESKDQKQKIIEEFGEGYFILKDGVYEWGNAGKLKIKKGSSKQSSSELVDSDILKDSFDLASELKGEKLMLYRDPSGNVFPSDKWMAAGVFFGKLERILISKLTNQYSISTIEDDSSKQSM

SEQ ID NO: 1118 - protein, 1108 aa, unknown
  Synthetic sequence
MAIRSIKLKLKTHTGPEAQNLRKGIWRTHRLLNEGVAYYMKMLLLFRQESTGERPKEELQEELICHIREQQQRNQADKNTQALPLDKALEALRQLYELLVPSSVGQSGDAQIISRKFLSPLVDPNSEGGKGTSKAGAKPTWQKKKEANDPTWEQDYEKWKKRREEDPTASVITTLEEYGIRPIFPLYTNTVTDIAWLPLQSNQFVRTWDRDMLQQAIERLLSWESWNKRVQEEYAKLKEKMAQLNEQLEGGQEWISLLEQYEENRERELRENMTAANDKYRITKRQMKGWNELYELWSTFPASASHEQYKEALKRVQQRLRGRFGDAHFFQYLMEEKNRLIWKGNPQRIHYFVARNELTKRLEEAKQSATMTLPNARKHPLWVRFDARGGNLQDYYLTAEADKPRSRRFVTFSQLIWPSESGWMEKKDVEVELALSRQFYQQVKLLKNDKGKQKIEFKDKGSGSTFNGHLGGAKLQLERGDLEKEEKNFEDGEIGSVYLNVVIDFEPLQEVKNGRVQAPYGQVLQLIRRPNEFPKVTTYKSEQLVEWIKASPQHSAGVESLASGFRVMSIDLGLRAAAATSIFSVEESSDKNAADFSYWIEGTPLVAVHQRSYMLRLPGEQVEKQVMEKRDERFQLHQRVKFQIRVLAQIMRMANKQYGDRWDELDSLKQAVEQKKSPLDQTDRTFWEGIVCDLTKVLPRNEADWEQAVVQIHRKAEEYVGKAVQAWRKRFAADERKGIAGLSMWNIEELEGLRKLLISWSRRTRNPQEVNRFERGHTSHQRLLTHIQNVKEDRLKQLSHAIVMTALGYVYDERKQEWCAEYPACQVILFENLSQYRSNLDRSTKENSTLMKWAHRSIPKYVHMQAEPYGIQIGDVRAEYSSRFYAKTGTPGIRCKKVRGQDLQGRRFENLQKRLVNEQFLTEEQVKQLRPGDIVPDDSGELFMTLTDGSGSKEVVFLQADINAAHNLQKRFWQRYNELFKVSCRVIVRDEEEYLVPKTKSVQAKLGKGLFVKKSDTAWKDVYVWDSQAKLKGKTTFTEESESPEQLEDFQEIIEEAEEAKGTYRTLFRDPSGVFFPESVWYPQKDFWGEVKRKLYGKLRERFLTKAR

SEQ ID NO: 1119 - protein, 658 aa, Methylobacterium nodulans
MLTKQDKQQKITYCTNMNEVFEAKLGSADLLLNWDHLRGRIRDRVDAGDIGSAFLKLALDVAHVLPDGVDDQLARAAFHFQSAKGAKSKHADSVQAGLRVLSIDLGVRSFATCSVFELKDTAPTTGVAFPLAEFRLWAVHERSFTLELPGENVGAAGQQWRAQADAELRQLRGGLNRHRQLLRAATVQKGERDAYLTDLREAWSAKELWPFEASLLSELERCSTVADPLWQDTCKRAARLYRTEFGAVVSEWRSRTRSREDRKYAGKSMWSVQHLTDVRRFLQSWSLAGRASGDIRRLDRERGGVFAKDLLDHIDALKDDRLKTGADLIVQAARGFQRNEFGYWVQKHAPCHVILFEDLSRYRMRTDRPRRENSQLMQWAHRGVPDMVGMQGEIYGIQDRRDPDSARKHARQPLAAFCLDTPAAFSSRYHASTMTPGIRCHPLRKREFEDQGFLELLKRENEGLDLNGYKPGDLVPLPGGEVFVCLNANGLSRIHADINAAQNLQRRFWTQHGDAFRLPCGKSAVQGQIRWAPLSMGKRQAGALGGFGYLEPTGHDSGSCQWRKTTEAEWRRLSGAQKDRDEAAAAEDEELQGLEEELLERSGERVVFFRDPSGVVLPTDLWFPSAAFWSIVRAKTVGRLRSHLDAQAEASYAVAAGL

SEQ ID NO: 1120 - protein, 1302 aa, unknown
  Synthetic sequence
MKKFELKQNFRNNYSGKTLRNFRQTLAQIANKKSSDSILTIKFKLDCSKTGKLPKYENLISLYDTIEDIKKGTLSYYLFTLIVSGFKFFGSASQAKAFSTKDIFKDNDFYNQFKIQSHLDLPDFVPSKIYQRLKKNVRSTNGKDNAFKASVIVAEYRKEIGKLKNKDESSEHQCEELFKKIGTALETRFSSWQDLINNCSTGCEIIDEILNDSFGTLPSIKKMVLASTTQSSDGEQDGIAIAYDPDSTFIKSDELLNPYFAVATILKSMPPEIQQDKKSAYVKANLTTPTHNALSWIFGKGLTLFQTESTEKLCAMFNVSDKRVIEQVQDAAKAVKLPAELDLNHCTLKFQDFRSSLGGHLDSWTTNYLKRLDELNDLLLNLPKNLSLPDIFMIDGKDFIEYSGCNRDEIQQMIDFVVNEQNRIKLQESLNALLGKGNNQICSDDISTVKDFSEIVNSLHSFVQQIDNSLEQSSNEANSIFSELKKKIEKNEKWDIWKNNLKKIPKLNKLSGGVPDAWKEIREIEQKFHEISENQKKHFTEVMEWIDAGNGTIDIFESRFKYDELLKKSKKNNLQSADELAFRSVLNKLGRFARQGNDLVCEKIKNWFKEQNIFDSSKDFNRYFINQKGFIFKHPSSKKDNSPYNLSANLLEKRYEVTNTVGALLEQCESDPAIVNDPFSMRSLVEFRALWFSINISGISKEQHIPTKIAQPKLDDSTYQESVSPTLKYRLEKEQITSSELNSIFTVYKSLLSGLSIRLSRNSFYLRTKFSWIGNNSLIYCPKETTWKIPAAYFKSDLWNEYKDKQILIVNEEYDVDVVKTFESVYKIVKSKDNNEKNRILPLLKQLPHDWMFKLPFGASNAEKCKVLKLEKNNKKFKPLSVSKDSLARLSGPSTYFNQIDEIMMNDESELSEMTLLADEPVRQQMSNGKIEIIPDDYVMSLAIPITRSLKKGNTESFPFKNIVSIDQGEAGFAYAVFKLSDCGNERAEPIATGLIPIPSIRRLIHSVKKYRGKKQRIQNFNQKFDSTMFTLRENVTGDICGLIVALMKKYNAFPILEKQVGNLESGSKQLMLVYKAVNSKFLAAKVDMQNDQRRSWWYQGNSWNTPILRISNPNQSNNKNIVKNINGKKYEELKIYPGYSVSAYMTSCICHVCGRNALELLKNDDSTGKVKKYQINQDGEVTIGGEVIKLYRKPDRLTPVKNLAKKGNRERTYASINERAPTVSVQKAELSADELQKIIKKNMRRAPRSLMSKDTTQSRYFCVFKNCPCHNKEQHADVNAAINIGRRFLKDCILDDNKEKD

SEQ ID NO: 1121 - protein, 1255 aa, unknown
  Synthetic sequence
MRSNYHGGRNARQWRKQISGLARRTKETVFTYKFPLETDAAEIDFDKAVQTYGIAEGVGHGSLIGLVCAFHLSGFRLFSKAGEAMAFRNRSRYPTDAFAEKLSAIMGIQLPTLSPEGLDLIFQSPPRSRDGIAPVWSENEVRNRLYTNWTGRGPANKPDEHLLEIAGEIAKQVFPKFGGWDDLASDPDKALAAADKYFQSQGDFPSIASLPAAIMLSPANSTVDFEGDYIAIDPAAETLLHQAVSRCAARLGRERPDLDQNKGPFVSSLQDALVSSQNNGLSWLFGVGFQHWKEKSPKELIDEYKVPADQHGAVTQVKSFVDAIPLNPLFDTTHYGEFRASVAGKVRSWVANYWKRLLDLKSLLATTEFTLPESISDPKAVSLFSGLLVDPQGLKKVADSLPARLVSAEEAIDRLMGVGIPTAADIAQVERVADEIGAFIGQVQQFNNQVKQKLENLQDADDEEFLKGLKIELPSGDKEPPAINRISGGAPDAAAEISELEEKLQRLLDARSEHFQTISEWAEENAVTLDPIAAMVELERLRLAERGATGDPEEYALRLLLQRIGRLANRVSPVSAGSIRELLKPVFMEEREFNLFFHNRLGSLYRSPYSTSRHQPFSIDVGKAKAIDWIAGLDQISSDIEKALSGAGEALGDQLRDWINLAGFAISQRLRGLPDTVPNALAQVRCPDDVRIPPLLAMLLEEDDIARDVCLKAFNLYVSAINGCLFGALREGFIVRTRFQRIGTDQIHYVPKDKAWEYPDRLNTAKGPINAAVSSDWIEKDGAVIKPVETVRNLSSTGFAGAGVSEYLVQAPHDWYTPLDLRDVAHLVTGLPVEKNITKLKRLTNRTAFRMVGASSFKTHLDSVLLSDKIKLGDFTIIIDQHYRQSVTYGGKVKISYEPERLQVEAAVPVVDTRDRTVPEPDTLFDHIVAIDLGERSVGFAVFDIKSCLRTGEVKPIHDNNGNPVVGTVAVPSIRRLMKAVRSHRRRRQPNQKVNQTYSTALQNYRENVIGDVCNRIDTLMERYNAFPVLEFQIKNFQAGAKQLEIVYGSVLHRYTFSGVDAHKAKRREYWYNGELWEHPYLMAKKWNEETNSMSGAPKPVSLFPGVTVNAARTSQICHQCQRNPMSHLRGLTGTIEISSDGLLELDDGTIRLFETSDYDEDKFKQSRREKRRLDANVLLSGRHRAEYIYTVAKRNLRRPPKNVMTKDTTQSRYTCLYKNCSWTGHADENAAINIGRRYLAERIDMPASKTKAAV

SEQ ID NO: 1122 - protein, 1266 aa, unknown
  Synthetic sequence
MRPRFHGGMNARDWRKHVGVLAQQHKETTRTYTFPLDTTGSAIDFDAALQAYNAVEGVGYGSLLGLACAVHLSGFRLFSTGKEAATFRNRARYPNAAFQAALRKELGTTITTLTPETLDRLFSSRPKRRNGVPLPWNQDSIRDRLYTNWVKPRPGDTPDAVLFQIATGIAQEITEDVSSWTDLAKNSDRGLKAAHRYFARVGGFPAFDNLTPPATVQPTDTTIDYDPNAPFHLVSHADQTLIHQSISLCAHRIRQEDPALDPNKSGFIKQLQNNFLSQTFYGLSWLFGAGYVHFRECTANDLAIQYGIPNNCRDGIHQIKSFADAILPNTFFEKKHYRKDSRSVGKKAKSWISNYWQRLLQLQTWVDDHTWVTLPQELTEAQFKPLFRGLLVDAVELMAIAERLPQRLADCRDSLDCLMGKGPQAATKNDVEIVEKVREEIESFVGQIEQLGNQLRHQLENENNDQVHRDNLHQLKNRLPLDLRRPQALNKISGGVPDVAKSIRGLETQLDQVLKERRSHFGRLTKWAKECGITLDPLQPLIESEKQRVAERGSAHDAKELAIRLLLQRIGRLGHRLSPTNATAIQELLRPVFAVKREFNLFFHNHMGALYRSPYSTSRHQPFQINVDVAHGTDWIGTIETLIQNLFTQIQDDALLRDLVQLEGFVFSHKLRALPGVIPSELARPNNLQQMGLPALLLVLLQADQVHRETVLRVFNLYGSAINGYLFQALRPGFIVRAGFQRLETKKLRYVPKAQSWQYPDRLHHAKSAIKNSLSAGWIKKNHQGAILPQKTLTALVKQKSLKDTGVPEYLVQAPHDWYVPIDLRGPAIPIEGLTVGTEGPELTQLGPMKDDCAFRAIGPSSFKSKIDAGLLPQDVKYGDMTLIFDQHYQQSISFANGTFSIQYQPTSLQVKAAIPVVDKRPRDTRNNSHLYDRIVAIDLGERKIGYAIFDLKQVLKSEQLEPMREDGKPLIGSISIRSIRGLMKAVQTHRNRRQPNYRIDQTYSKALMHYRESVIGDVCNAIDTLCARYGGFPVLESSVRNFEVGSAQLKTVYGSVSRRYTWSAVDAHKNQRQQYWLGGTKDKIPIWTHPYLMTREWDEKNSKWSNRSKPLKMHPGVEVHPAGTSQICHQCKRNPIGALWNVADTVVLDDQGQLDLDDGTIRLNSGYIDTTEIKRARRKKIRLPENKPLTGSHKTSHVRAVARRNLRQPPKSTRAKDTTQSRYTCLYVDCGHECHADENAAINIGRKYLQERIHIEASRQALSTR

SEQ ID NO: 1123 - protein, 1269 aa, unknown
  Synthetic sequence
MVAGLKKIKRDGVTMKSNYHGGVKARAWRKRIGGLARRQKETVFTYKFPLETEEAGIDFDKAVQTYGIAEGISQGSLIGLVCAFHLSGFRLFSKADETKAFCNQGRYPNQAFAEKLRNELSVTLPKLSPQSLDVLFQSSPKSKNGVAPEWSKNAIRNRLYTNWTGKGAGTNPDEHLLEIAEDIAAEIDSDLDGWKDLEEHPEKGLSAADRYFQAQGDFPSLTGLPPSVPLTPQNSTVAFEGDPVCLNPSDNTLLHQAVARCAGRILQEQPNLSPDKNRFINQLQDELVSSQNNGLSWLFGVGFKYWKEMSVDQLADDYKVKSTDLDALKQVKSFIDAIPLNPLFDTPHYGEFRASVAGKMRSWVKNYWKRLLDLKSQLGTANINLPEGLDEQRAENLFSGLLIDSKGLRQVTDKLPSRLKKAEDTIDRLMGDGNPTSDDIEQVETVAAEISAFIGQVEQFNNQLEQRLENPLEGDDETFLKQLKIDLPAEFKKPPAINRISGGSPDPTAEIAELEEKLDRLMSARKEHYETIAEWASANKVTLDPMEAMTTLEAQRLTERGAEGDQEEFALRLLLQRIGRLANRLSPQGATAIRDLLRPVFTEKREFNLFFHNRMGSLYRSPYSTSRHQPFTIDVAVAKNTDWMDALDGIAETIMKGLSQAGDELSLRLRDWINISGFSLSQRLRGLPDTVPGELALVRSADDVRIPPMLALQLEEDEVSREVCLKAFNLYVSAINGCLFRALREGFIVRTKFQRLERDVLSYVPKTKLWNYPQRLDTARGPIHSALAAAWINKEGSVIDPVETVTALSDTGFSDDGIPEYLVQAPHDWYTPIDLRDISKPVSGLPVKKNITGLKRQKKQTAFRMVGPSSFKSHLDSTLLSEEVKLGDFTLIFDQYYKQRVSYNGRVKITFEPDRLHVEAAVPVIDKRVRPSTEEDALFDHLLAIDLGEKRVGYAVYDIKACLRTGDIKPLEDGDGKPIVGSVAVPSIRRLMKAVRSHRQQRQPNQKVNQTYSTALMNYRENVIGDVCNRIDTLMEKYNAFPVLESSVMNFEAGSRQLEMVYGSVLHRYTYSKIDAHTAKRKEYWYTGEYWDHPYLMAHKWNERTRSYSGSLSALTLYPGVMVHPAGTSQRCHQCKRNPMVEIKQLTGQVEINADGSLELDDGTICLYEGYDYSPEEYKKAKREKRRLDPNVPLSGRHQAKHVSAVAKRNLRRPTVSMMSGDTTQARYVCLYTDCDFTGHADENAAINIGWKYLTERIALSESKDKAGV

SEQ ID NO: 1124 - protein, 1340 aa, unknown
  Synthetic sequence
MQISKVNHKHVAVGQKDRERITGFIYNDPVGDEKSLEDVVAKRANDTKVLFNVFNTKDLYDSQESDKSEKDKEIISKGAKFVAKSFNSAITILKKQNKIYSTLTSQQVIKELKDKFGGARIYDDDIEEALTETLKKSFRKENVRNSIKVLIENAAGIRSSLSKDEEELIQEYFVKQLVEEYTKTKLQKNVVKSIKNQNMVIQPDSDSQVLSLSESRREKQSSAVSSDTLVNCKEKDVLKAFLTDYAVLDEDERNSLLWKLRNLVNLYFYGSESIRDYSYTKEKSVWKEHDEQKANKTLFIDEICHITKIGKNGKEQKVLDYEENRSRCRKQNINYYRSALNYAKNNTSGIFENEDSNHFWIHLIENEVERLYNGIENGEEFKFETGYISEKVWKAVINHLSIKYIALGKAVYNYAMKELSSPGDIEPGKIDDSYINGITSFDYEIIKAEESLQRDISMNVVFATNYLACATVDTDKDFLLFSKEDIRSCTKKDGNLCKNIMQFWGGYSTWKNFCEEYLKDDKDALELLYSLKSMLYSMRNSSFHFSTENVDNGSWDTELIGKLFEEDCNRAARIEKEKFYNNNLHMFYSSSLLEKVLERLYSSHHERASQVPSFNRVFVRKNFPSSLSEQRITPKFTDSKDEQIWQSAVYYLCKEIYYNDFLQSKEAYKLFREGVKNLDKNDINNQKAADSFKQAVVYYGKAIGNATLSQVCQAIMTEYNRQNNDGLKKKSAYAEKQNSNKYKHYPLFLKQVLQSAFWEYLDENKEIYGFISAQIHKSNVEIKAEDFIANYSSQQYKKLVDKVKKTPELQKWYTLGRLINPRQANQFLGSIRNYVQFVKDIQRRAKENGNPIRNYYEVLESDSIIKILEMCTKLNGTTSNDIHDYFRDEDEYAEYISQFVNFGDVHSGAALNAFCNSESEGKKNGIYYDGINPIVNRNWVLCKLYGSPDLISKIISRVNENMIHDFHKQEDLIREYQIKGICSNKKEQQDLRTFQVLKNRVELRDIVEYSEIINELYGQLIKWCYLRERDLMYFQLGFHYLCLNNASSKEADYIKINVDDRNISGAILYQIAAMYINGLPVYYKKDDMYVALKSGKKASDELNSNEQTSKKINYFLKYGNNILGDKKDQLYLAGLELFENVAEHENIIIFRNEIDHFHYFYDRDRSMLDLYSEVFDRFFTYDMKLRKNVVNMLYNILLDHNIVSSFVFETGEKKVGRGDSEVIKPSAKIRLRANNGVSSDVFTYKVGSKDELKIATLPAKNEEFLLNVARLIYYPDMEAVSENMVREGVVKVEKSNDKKGKISRGSNTRSSNQSKYNNKSKNRMNYSMGSIFEKMDLKFD

SEQ ID NO: 1125 - protein, 1437 aa, unknown
  Synthetic sequence
MKISKVREENRGAKLTVNAKTAVVSENRSQEGILYNDPSRYGKSRKNDEDRDRYIESRLKSSGKLYRIFNEDKNKRETDELQWFLSEIVKKINRRNGLVLSDMLSVDDRAFEKAFEKYAELSYTNRRNKVSGSPAFETCGVDAATAERLKGIISETNFINRIKNNIDNKVSEDIIDRIIAKYLKKSLCRERVKRGLKKLLMNAFDLPYSDPDIDVQRDFIDYVLEDFYHVRAKSQVSRSIKNMNMPVQPEGDGKFAITVSKGGTESGNKRSAEKEAFKKFLSDYASLDERVRDDMLRRMRRLVVLYFYGSDDSKLSDVNEKFDVWEDHAARRVDNREFIKLPLENKLANGKTDKDAERIRKNTVKELYRNQNIGCYRQAVKAVEEDNNGRYFDDKMLNMFFIHRIEYGVEKIYANLKQVTEFKARTGYLSEKIWKDLINYISIKYIAMGKAVYNYAMDELNASDKKEIELGKISEEYLSGISSFDYELIKAEEMLQRETAVYVAFAARHLSSQTVELDSENSDFLLLKPKGTMDKNDKNKLASNNILNFLKDKETLRDTILQYFGGHSLWTDFPFDKYLAGGKDDVDFLTDLKDVIYSMRNDSFHYATENHNNGKWNKELISAMFEHETERMTVVMKDKFYSNNLPMFYKNDDLKKLLIDLYKDNVERASQVPSFNKVFVRKNFPALVRDKDNLGIELDLKADADKGENELKFYNALYYMFKEIYYNAFLNDKNVRERFITKATKVADNYDRNKERNLKDRIKSAGSDEKKKLREQLQNYIAENDFGQRIKNIVQVNPDYTLAQICQLIMTEYNQQNNGCMQKKSAARKDINKDSYQHYKMLLLVNLRKAFLEFIKENYAFVLKPYKHDLCDKADFVPDFAKYVKPYAGLISRVAGSSELQKWYIVSRFLSPAQANHMLGFLHSYKQYVWDIYRRASETGTEINHSIAEDKIAGVDITDVDAVIDLSVKLCGTISSEISDYFKDDEVYAEYISSYLDFEYDGGNYKDSLNRFCNSDAVNDQKVALYYDGEHPKLNRNIILSKLYGERRFLEKITDRVSRSDIVEYYKLKKETSQYQTKGIFDSEDEQKNIKKFQEMKNIVEFRDLMDYSEIADELQGQLINWIYLRERDLMNFQLGYHYACLNNDSNKQATYVTLDYQGKKNRKINGAILYQICAMYINGLPLYYVDKDSSEWTVSDGKESTGAKIGEFYRYAKSFENTSDCYASGLEIFENISEHDNITELRNYIEHFRYYSSFDRSFLGIYSEVFDRFFTYDLKYRKNVPTILYNILLQHFVNVRFEFVSGKKMIGIDKKDRKIAKEKECARITIREKNGVYSEQFTYKLKNGTVYVDARDKRYLQSIIRLLFYPEKVNMDEMIEVKEKKKPSDNNTGKGYSKRDRQQDRKEYDKYKEKKKKEGNFLSGMGGNINWDEINAQLKN

SEQ ID NO: 1126 - protein, 1385 aa, Clostridium aminophilum
MKFSKVDHTRSAVGIQKATDSVHGMLYTDPKKQEVNDLDKRFDQLNVKAKRLYNVFNQSKAEEDDDEKRFGKVVKKLNRELKDLLFHREVSRYNSIGNAKYNYYGIKSNPEEIVSNLGMVESLKGERDPQKVISKLLLYYLRKGLKPGTDGLRMILEASCGLRKLSGDEKELKVFLQTLDEDFEKKTFKKNLIRSIENQNMAVQPSNEGDPIIGITQGRFNSQKNEEKSAIERMMSMYADLNEDHREDVLRKLRRLNVLYFNVDTEKTEEPTLPGEVDTNPVFEVWHDHEKGKENDRQFATFAKILTEDRETRKKEKLAVKEALNDLKSAIRDHNIMAYRCSIKVTEQDKDGLFFEDQRINRFWIHHIESAVERILASINPEKLYKLRIGYLGEKVWKDLLNYLSIKYIAVGKAVFHFAMEDLGKTGQDIELGKLSNSVSGGLTSFDYEQIRADETLQRQLSVEVAFAANNLFRAVVGQTGKKIEQSKSEENEEDFLLWKAEKIAESIKKEGEGNTLKSILQFFGGASSWDLNHFCAAYGNESSALGYETKFADDLRKAIYSLRNETFHFTTLNKGSFDWNAKLIGDMFSHEAATGIAVERTRFYSNNLPMFYRESDLKRIMDHLYNTYHPRASQVPSFNSVFVRKNFRLFLSNTLNTNTSFDTEVYQKWESGVYYLFKEIYYNSFLPSGDAHHLFFEGLRRIRKEADNLPIVGKEAKKRNAVQDFGRRCDELKNLSLSAICQMIMTEYNEQNNGNRKVKSTREDKRKPDIFQHYKMLLLRTLQEAFAIYIRREEFKFIFDLPKTLYVMKPVEEFLPNWKSGMFDSLVERVKQSPDLQRWYVLCKFLNGRLLNQLSGVIRSYIQFAGDIQRRAKANHNRLYMDNTQRVEYYSNVLEVVDFCIKGTSRFSNVFSDYFRDEDAYADYLDNYLQFKDEKIAEVSSFAALKTFCNEEEVKAGIYMDGENPVMQRNIVMAKLFGPDEVLKNVVPKVTREEIEEYYQLEKQIAPYRQNGYCKSEEDQKKLLRFQRIKNRVEFQTITEFSEIINELLGQLISWSFLRERDLLYFQLGFHYLCLHNDTEKPAEYKEISREDGTVIRNAILHQVAAMYVGGLPVYTLADKKLAAFEKGEADCKLSISKDTAGAGKKIKDFFRYSKYVLIKDRMLTDQNQKYTIYLAGLELFENTDEHDNITDVRKYVDHFKYYATSDENAMSILDLYSEIHDRFFTYDMKYQKNVANMLENILLRHFVLIRPEFFTGSKKVGEGKKITCKARAQIEIAENGMRSEDFTYKLSDGKKNISTCMIAARDQKYLNTVARLLYYPHEAKKSIVDTREKKNNKKTNRGDGTFNKQKGTARKEKDNGPREFNDTGFSNTPFAGFDPFRNS

SEQ ID NO: 1127 - protein, 1334 aa, unknown
  Synthetic sequence
MKISKVDHTRMAVAKGNQHRRDEISGILYKDPTKTGSIDFDERFKKLNCSAKILYHVFNGIAEGSNKYKNIVDKVNNNLDRVLFTGKSYDRKSIIDIDTVLRNVEKINAFDRISTEEREQIIDDLLEIQLRKGLRKGKAGLREVLLIGAGVIVRTDKKQEIADFLEILDEDFNKTNQAKNIKLSIENQGLVVSPVSRGEERIFDVSGAQKGKSSKKAQEKEALSAFLLDYADLDKNVRFEYLRKIRRLINLYFYVKNDDVMSLTEIPAEVNLEKDFDIWRDHEQRKEENGDFVGCPDILLADRDVKKSNSKQVKIAERQLRESIREKNIKRYRFSIKTIEKDDGTYFFANKQISVFWIHRIENAVERILGSINDKKLYRLRLGYLGEKVWKDILNFLSIKYIAVGKAVFNFAMDDLQEKDRDIEPGKISENAVNGLTSFDYEQIKADEMLQREVAVNVAFAANNLARVTVDIPQNGEKEDILLWNKSDIKKYKKNSKKGILKSILQFFGGASTWNMKMFEIAYHDQPGDYEENYLYDIIQIIYSLRNKSFHFKTYDHGDKNWNRELIGKMIEHDAERVISVEREKFHSNNLPMFYKDADLKKILDLLYSDYAGRASQVPAFNTVLVRKNFPEFLRKDMGYKVHFNNPEVENQWHSAVYYLYKEIYYNLFLRDKEVKNLFYTSLKNIRSEVSDKKQKLASDDFASRCEEIEDRSLPEICQIIMTEYNAQNFGNRKVKSQRVIEKNKDIFRHYKMLLIKTLAGAFSLYLKQERFAFIGKATPIPYETTDVKNFLPEWKSGMYASFVEEIKNNLDLQEWYIVGRFLNGRMLNQLAGSLRSYIQYAEDIERRAAENRNKLFSKPDEKIEACKKAVRVLDLCIKISTRISAEFTDYFDSEDDYADYLEKYLKYQDDAIKELSGSSYAALDHFCNKDDLKFDIYVNAGQKPILQRNIVMAKLFGPDNILSEVMEKVTESAIREYYDYLKKVSGYRVRGKCSTEKEQEDLLKFQRLKNAVEFRDVTEYAEVINELLGQLISWSYLRERDLLYFQLGFHYMCLKNKSFKPAEYVDIRRNNGTIIHNAILYQIVSMYINGLDFYSCDKEGKTLKPIETGKGVGSKIGQFIKYSQYLYNDPSYKLEIYNAGLEVFENIDEHDNITDLRKYVDHFKYYAYGNKMSLLDLYSEFFDRFFTYDMKYQKNVVNVLENILLRHFVIFYPKFGSGKKDVGIRDCKKERAQIEISEQSLTSEDFMFKLDDKAGEEAKKFPARDERYLQTIAKLLYYPNEIEDMNRFMKKGETINKKVQFNRKKKITRKQKNNSSNEVLSSTMGYLFKNIKL

SEQ ID NO: 1128 - protein, 1175 aa, Carnobacterium gallinarum
MRITKVKIKLDNKLYQVTMQKEEKYGTLKLNEESRKSTAEILRLKKASFNKSFHSKTINSQKENKNATIKKNGDYISQIFEKLVGVDTNKNIRKPKMSLTDLKDLPKKDLALFIKRKFKNDDIVEIKNLDLISLFYNALQKVPGEHFTDESWADFCQEMMPYREYKNKFIERKIILLANSIEQNKGFSINPETFSKRKRVLHQWAIEVQERGDFSILDEKLSKLAEIYNFKKMCKRVQDELNDLEKSMKKGKNPEKEKEAYKKQKNFKIKTIWKDYPYKTHIGLIEKIKENEELNQFNIEIGKYFEHYFPIKKERCTEDEPYYLNSETIATTVNYQLKNALISYLMQIGKYKQFGLENQVLDSKKLQEIGIYEGFQTKFMDACVFATSSLKNIIEPMRSGDILGKREFKEAIATSSFVNYHHFFPYFPFELKGMKDRESELIPFGEQTEAKQMQNIWALRGSVQQIRNEIFHSFDKNQKFNLPQLDKSNFEFDASENSTGKSQSYIETDYKFLFEAEKNQLEQFFIERIKSSGALEYYPLKSLEKLFAKKEMKFSLGSQVVAFAPSYKKLVKKGHSYQTATEGTANYLGLSYYNRYELKEESFQAQYYLLKLIYQYVFLPNFSQGNSPAFRETVKAILRINKDEARKKMKKNKKFLRKYAFEQVREMEFKETPDQYMSYLQSEMREEKVRKAEKNDKGFEKNITMNFEKLLMQIFVKGFDVFLTTFAGKELLLSSEEKVIKETEISLSKKINEREKTLKASIQVEHQLVATNSAISYWLFCKLLDSRHLNELRNEMIKFKQSRIKFNHTQHAELIQNLLPIVELTILSNDYDEKNDSQNVDVSAYFEDKSLYETAPYVQTDDRTRVSFRPILKLEKYHTKSLIEALLKDNPQFRVAATDIQEWMHKREEIGELVEKRKNLHTEWAEGQQTLGAEKREEYRDYCKKIDRFNWKANKVTLTYLSQLHYLITDLLGRMVGFSALFERDLVYFSRSFSELGGETYHISDYKNLSGVLRLNAEVKPIKIKNIKVIDNEENPYKGNEPEVKPFLDRLHAYLENVIGIKAVHGKIRNQTAHLSVLQLELSMIESMNNLRDLMAYDRKLKNAVTKSMIKILDKHGMILKLKIDENHKNFEIESLIPKEIIHLKDKAIKTNQVSEEYCQLVLALLTTNPGNQLN

SEQ ID NO: 1129 - protein, 1154 aa, Paludibacter propionicigenes
MRVSKVKVKDGGKDKMVLVHRKTTGAQLVYSGQPVSNETSNILPEKKRQSFDLSTLNKTIIKFDTAKKQKLNVDQYKIVEKIFKYPKQELPKQIKAEEILPFLNHKFQEPVKYWKNGKEESFNLTLLIVEAVQAQDKRKLQPYYDWKTWYIQTKSDLLKKSIENNRIDLTENLSKRKKALLAWETEFTASGSIDLTHYHKVYMTDVLCKMLQDVKPLTDDKGKINTNAYHRGLKKALQNHQPAIFGTREVPNEANRADNQLSIYHLEVVKYLEHYFPIKTSKRRNTADDIAHYLKAQTLKTTIEKQLVNAIRANIIQQGKTNHHELKADTTSNDLIRIKTNEAFVLNLTGTCAFAANNIRNMVDNEQTNDILGKGDFIKSLLKDNTNSQLYSFFFGEGLSTNKAEKETQLWGIRGAVQQIRNNVNHYKKDALKTVFNISNFENPTITDPKQQTNYADTIYKARFINELEKIPEAFAQQLKTGGAVSYYTIENLKSLLTTFQFSLCRSTIPFAPGFKKVFNGGINYQNAKQDESFYELMLEQYLRKENFAEESYNARYFMLKLIYNNLFLPGFTTDRKAFADSVGFVQMQNKKQAEKVNPRKKEAYAFEAVRPMTAADSIADYMAYVQSELMQEQNKKEEKVAEETRINFEKFVLQVFIKGFDSFLRAKEFDFVQMPQPQLTATASNQQKADKLNQLEASITADCKLTPQYAKADDATHIAFYVFCKLLDAAHLSNLRNELIKFRESVNEFKFHHLLEIIEICLLSADVVPTDYRDLYSSEADCLARLRPFIEQGADITNWSDLFVQSDKHSPVIHANIELSVKYGTTKLLEQIINKDTQFKTTEANFTAWNTAQKSIEQLIKQREDHHEQWVKAKNADDKEKQERKREKSNFAQKFIEKHGDDYLDICDYINTYNWLDNKMHFVHLNRLHGLTIELLGRMAGFVALFDRDFQFFDEQQIADEFKLHGFVNLHSIDKKLNEVPTKKIKEIYDIRNKIIQINGNKINESVRANLIQFISSKRNYYNNAFLHVSNDEIKEKQMYDIRNHIAHFNYLTKDAADFSLIDLINELRELLHYDRKLKNAVSKAFIDLFDKHGMILKLKLNADHKLKVESLEPKKIYHLGSSAKDKPEYQYCTNQVMMAYCNMCRSLLEMKK

SEQ ID NO: 1130 - protein, 1120 aa, Listeria seeligeri
MWISIKTLIHHLGVLFFCDYMYNRREKKIIEVKTMRITKVEVDRKKVLISRDKNGGKLVYENEMQDNTEQIMHHKKSSFYKSVVNKTICRPEQKQMKKLVHGLLQENSQEKIKVSDVTKLNISNFLNHRFKKSLYYFPENSPDKSEEYRIEINLSQLLEDSLKKQQGTFICWESFSKDMELYINWAENYISSKTKLIKKSIRNNRIQSTESRSGQLMDRYMKDILNKNKPFDIQSVSEKYQLEKLTSALKATFKEAKKNDKEINYKLKSTLQNHERQIIEELKENSELNQFNIEIRKHLETYFPIKKTNRKVGDIRNLEIGEIQKIVNHRLKNKIVQRILQEGKLASYEIESTVNSNSLQKIKIEEAFALKFINACLFASNNLRNMVYPVCKKDILMIGEFKNSFKEIKHKKFIRQWSQFFSQEITVDDIELASWGLRGAIAPIRNEIIHLKKHSWKKFFNNPTFKVKKSKIINGKTKDVTSEFLYKETLFKDYFYSELDSVPELIINKMESSKILDYYSSDQLNQVFTIPNFELSLLTSAVPFAPSFKRVYLKGFDYQNQDEAQPDYNLKLNIYNEKAFNSEAFQAQYSLFKMVYYQVFLPQFTTNNDLFKSSVDFILTLNKERKGYAKAFQDIRKMNKDEKPSEYMSYIQSQLMLYQKKQEEKEKINHFEKFINQVFIKGFNSFIEKNRLTYICHPTKNTVPENDNIEIPFHTDMDDSNIAFWLMCKLLDAKQLSELRNEMIKFSCSLQSTEEISTFTKAREVIGLALLNGEKGCNDWKELFDDKEAWKKNMSLYVSEELLQSLPYTQEDGQTPVINRSIDLVKKYGTETILEKLFSSSDDYKVSAKDIAKLHEYDVTEKIAQQESLHKQWIEKPGLARDSAWTKKYQNVINDISNYQWAKTKVELTQVRHLHQLTIDLLSRLAGYMSIADRDFQFSSNYILERENSEYRVTSWILLSENKNKNKYNDYELYNLKNASIKVSSKNDPQLKVDLKQLRLTLEYLELFDNRLKEKRNNISHFNYLNGQLGNSILELFDDARDVLSYDRKLKNAVSKSLKEILSSHGMEVTFKPLYQTNHHLKIDKLQPKKIHHLGEKSTVSSNQVSNEYCQLVRTLLTMK

SEQ ID NO: 1131 - protein, 1051 aa, Listeria newyorkensis
MKITKMRVDGRTIVMERTSKEGQLGYEGIDGNKTTEIIFDKKKESFYKSILNKTVRKPDEKEKNRRKQAINKAINKEITELMLAVLHQEVPSQKLHNLKSLNTESLTKLFKPKFQNMISYPPSKGAEHVQFCLTDIAVPAIRDLDEIKPDWGIFFEKLKPYTDWAESYIHYKQTTIQKSIEQNKIQSPDSPRKLVLQKYVTAFLNGEPLGLDLVAKKYKLADLAESFKLVDLNEDKSANYKIKACLQQHQRNILDELKEDPELNQYGIEVKKYIQRYFPIKRAPNRSKHARADFLKKELIESTVEQQFKNAVYHYVLEQGKMEAYELTDPKTKDLQDIRSGEAFSFKFINACAFASNNLKMILNPECEKDILGKGNFKKNLPNSTTRSDVVKKMIPFFSDELQNVNFDEAIWAIRGSIQQIRNEVYHCKKHSWKSILKIKGFEFEPNNMKYADSDMQKLMDKDIAKIPEFIEEKLKSSGVVRFYRHDELQSIWEMKQGFSLLTTNAPFVPSFKRVYAKGHDYQTSKNRYYNLDLTTFDILEYGEEDFRARYFLTKLVYYQQFMPWFTADNNAFRDAANFVLRLNKNRQQDAKAFINIREVEEGEMPRDYMGYVQGQIAIHEDSIEDTPNHFEKFISQVFIKGFDRHMRSANLKFIKNPRNQGLEQSEIEEMSFDIKVEPSFLKNKDDYIAFWIFCKMLDARHLSELRNEMIKYDGHLTGEQEIIGLALLGVDSRENDWKQFFSSEREYEKIMKGYVVEELYQREPYRQSDGKTPILFRGVEQARKYGTETVIQRLFDANPEFKVSKCNLAEWERQKETIEETIKRRKELHNEWAKNPKKPQNNAFFKEYKECCDAIDAYNWHKNKTTLAYVNELHHLLIEILGRYVGYVAIADRDFQCMANQYFKHSGITERVEYWGDNRLKSIKKLDTFLKKEGLFVSEKNARNHIAHLNYLSLKSECTLLYLSERLREIFKYDRKLKNAVSKSLIDILDRHGMSVVFANLKENKHRLVIKSLEPKKLRHLGGKKIDGGYIETNQVSEEYCGIVKRLLEM

SEQ ID NO: 1132 - protein, 1182 aa, Leptotrichia wadei
MYMKITKIDGVSHYKKQDKGILKKKWKDLDERKQREKIEARYNKQIESKIYKEFFRLKNKKRIEKEEDQNIKSLYFFIKELYLNEKNEEWELKNINLEILDDKERVIKGYKFKEDVYFFKEGYKEYYLRILFNNLIEKVQNENREKVRKNKEFLDLKEIFKKYKNRKIDLLLKSINNNKINLEYKKENVNEEIYGINPTNDREMTFYELLKEIIEKKDEQKSILEEKLDNFDITNFLENIEKIFNEETEINIIKGKVLNELREYIKEKEENNSDNKLKQIYNLELKKYIENNFSYKKQKSKSKNGKNDYLYLNFLKKIMFIEEVDEKKEINKEKFKNKINSNFKNLFVQHILDYGKLLYYKENDEYIKNTGQLETKDLEYIKTKETLIRKMAVLVSFAANSYYNLFGRVSGDILGTEVVKSSKTNVIKVGSHIFKEKMLNYFFDFEIFDANKIVEILESISYSIYNVRNGVGHFNKLILGKYKKKDINTNKRIEEDLNNNEEIKGYFIKKRGEIERKVKEKFLSNNLQYYYSKEKIENYFEVYEFEILKRKIPFAPNFKRIIKKGEDLFNNKNNKKYEYFKNFDKNSAEEKKEFLKTRNFLLKELYYNNFYKEFLSKKEEFEKIVLEVKEEKKSRGNINNKKSGVSFQSIDDYDTKINISDYIASIHKKEMERVEKYNEEKQKDTAKYIRDFVEEIFLTGFINYLEKDKRLHFLKEEFSILCNNNNNVVDFNININEEKIKEFLKENDSKTLNLYLFFNMIDSKRISEFRNELVKYKQFTKKRLDEEKEFLGIKIELYETLIEFVILTREKLDTKKSEEIDAWLVDKLYVKDSNEYKEYEEILKLFVDEKILSSKEAPYYATDNKTPILLSNFEKTRKYGTQSFLSEIQSNYKYSKVEKENIEDYNKKEEIEQKKKSNIEKLQDLKVELHKKWEQNKITEKEIEKYNNTTRKINEYNYLKNKEELQNVYLLHEMLSDLLARNVAFFNKWERDFKFIVIAIKQFLRENDKEKVNEFLNPPDNSKGKKVYFSVSKYKNTVENIDGIHKNFMNLIFLNNKFMNRKIDKMNCAIWVYFRNYIAHFLHLHTKNEKISLISQMNLLIKLFSYDKKVQNHILKSTKTLLEKYNIQINFEISNDKNEVFKYKIKNRLYSKKGKMLGKNNKFEILENEFLENVKAMLEYSE

SEQ ID NO: 1133 - protein, 1285 aa, Rhodobacter capsulatus
MQIGKVQGRTISEFGDPAGGLKRKISTDGKNRKELPAHLSSDPKALIGQWISGIDKIYRKPDSRKSDGKAIHSPTPSKMQFDARDDLGEAFWKLVSEAGLAQDSDYDQFKRRLHPYGDKFQPADSGAKLKFEADPPEPQAFHGRWYGAMSKRGNDAKELAAALYEHLHVDEKRIDGQPKRNPKTDKFAPGLVVARALGIESSVLPRGMARLARNWGEEEIQTYFVVDVAASVKEVAKAAVSAAQAFDPPRQVSGRSLSPKVGFALAEHLERVTGSKRCSFDPAAGPSVLALHDEVKKTYKRLCARGKNAARAFPADKTELLALMRHTHENRVRNQMVRMGRVSEYRGQQAGDLAQSHYWTSAGQTEIKESEIFVRLWVGAFALAGRSMKAWIDPMGKIVNTEKNDRDLTAAVNIRQVISNKEMVAEAMARRGIYFGETPELDRLGAEGNEGFVFALLRYLRGCRNQTFHLGARAGFLKEIRKELEKTRWGKAKEAEHVVLTDKTVAAIRAIIDNDAKALGARLLADLSGAFVAHYASKEHFSTLYSEIVKAVKDAPEVSSGLPRLKLLLKRADGVRGYVHGLRDTRKHAFATKLPPPPAPRELDDPATKARYIALLRLYDGPFRAYASGITGTALAGPAARAKEAATALAQSVNVTKAYSDVMEGRSSRLRPPNDGETLREYLSALTGETATEFRVQIGYESDSENARKQAEFIENYRRDMLAFMFEDYIRAKGFDWILKIEPGATAMTRAPVLPEPIDTRGQYEHWQAALYLVMHFVPASDVSNLLHQLRKWEALQGKYELVQDGDATDQADARREALDLVKRFRDVLVLFLKTGEARFEGRAAPFDLKPFRALFANPATFDRLFMATPTTARPAEDDPEGDGASEPELRVARTLRGLRQIARYNHMAVLSDLFAKHKVRDEEVARLAEIEDETQEKSQIVAAQELRTDLHDKVMKCHPKTISPEERQSYAAAIKTIEEHRFLVGRVYLGDHLRLHRLMMDVIGRLIDYAGAYERDTGTFLINASKQLGAGADWAVTIAGAANTDARTQTRKDLAHFNVLDRADGTPDLTALVNRAREMMAYDRKRKNAVPRSILDMLARLGLTLKWQMKDHLLQDATITQAAIKHLDKVRLTVGGPAAVTEARFSQDYLQMVAAVFNGSVQNPKPRRRDDGDAWHKPPKPATAQSQPDQKPPNKAPSAGSRLPPPQVGEVYEGVVVKVIDTGSLGFLAVEGVAGNIGLHISRLRRIREDAIIVGRRYRFRVEIYVPPKSNTSKLNAADLVRID

SEQ ID NO: 1134 - protein, 1159 aa, Leptotrichia buccalis
MKVTKVGGISHKKYTSEGRLVKSESEENRTDERLSALLNMRLDMYIKNPSSTETKENQKRIGKLKKFFSNKMVYLKDNTLSLKNGKKENIDREYSETDILESDVRDKKNFAVLKKIYLNENVNSEELEVFRNDIKKKLNKINSLKYSFEKNKANYQKINENNIEKVEGKSKRNIIYDYYRESAKRDAYVSNVKEAFDKLYKEEDIAKLVLEIENLTKLEKYKIREFYHEIIGRKNDKENFAKIIYEEIQNVNNMKELIEKVPDMSELKKSQVFYKYYLDKEELNDKNIKYAFCHFVEIEMSQLLKNYVYKRLSNISNDKIKRIFEYQNLKKLIENKLLNKLDTYVRNCGKYNYYLQDGEIATSDFIARNRQNEAFLRNIIGVSSVAYFSLRNILETENENDITGRMRGKTVKNNKGEEKYVSGEVDKIYNENKKNEVKENLKMFYSYDFNMDNKNEIEDFFANIDEAISSIRHGIVHFNLELEGKDIFAFKNIAPSEISKKMFQNEINEKKLKLKIFRQLNSANVFRYLEKYKILNYLKRTRFEFVNKNIPFVPSFTKLYSRIDDLKNSLGIYWKTPKTNDDNKTKEIIDAQIYLLKNIYYGEFLNYFMSNNGNFFEISKEIIELNKNDKRNLKTGFYKLQKFEDIQEKIPKEYLANIQSLYMINAGNQDEEEKDTYIDFIQKIFLKGFMTYLANNGRLSLIYIGSDEETNTSLAEKKQEFDKFLKKYEQNNNIKIPYEINEFLREIKLGNILKYTERLNMFYLILKLLNHKELTNLKGSLEKYQSANKEEAFSDQLELINLLNLDNNRVTEDFELEADEIGKFLDFNGNKVKDNKELKKFDTNKIYFDGENIIKHRAFYNIKKYGMLNLLEKIADKAGYKISIEELKKYSNKKNEIEKNHKMQENLHRKYARPRKDEKFTDEDYESYKQAIENIEEYTHLKNKVEFNELNLLQGLLLRILHRLVGYTSIWERDLRFRLKGEFPENQYIEEIFNFENKKNVKYKGGQIVEKYIKFYKELHQNDEVKINKYSSANIKVLKQEKKDLYIRNYIAHFNYIPHAEISLLEVLENLRKLLSYDRKLKNAVMKSVVDILKEYGFVATFKIGADKKIGIQTLESEKIVHLKNLKKKKLMTDRNSEELCKLVKIMFEYKMEEKKSEN

SEQ ID NO: 1135 - protein, 1389 aa, Leptotrichia shahii
MGNLFGHKRWYEVRDKKDFKIKRKVKVKRNYDGNKYILNINENNNKEKIDNNKFIRKYINYKKNDNILKEFTRKFHAGNILFKLKGKEGIIRIENNDDFLETEEVVLYIEAYGKSEKLKALGITKKKIIDEAIRQGITKDDKKIEIKRQENEEEIEIDIRDEYTNKTLNDCSIILRIIENDELETKKSIYEIFKNINMSLYKIIEKIIENETEKVFENRYYEEHLREKLLKDDKIDVILTNFMEIREKIKSNLEILGFVKFYLNVGGDKKKSKNKKMLVEKILNINVDLTVEDIADFVIKELEFWNITKRIEKVKKVNNEFLEKRRNRTYIKSYVLLDKHEKFKIERENKKDKIVKFFVENIKNNSIKEKIEKILAEFKIDELIKKLEKELKKGNCDTEIFGIFKKHYKVNFDSKKFSKKSDEEKELYKIIYRYLKGRIEKILVNEQKVRLKKMEKIEIEKILNESILSEKILKRVKQYTLEHIMYLGKLRHNDIDMTTVNTDDFSRLHAKEELDLELITFFASTNMELNKIFSRENINNDENIDFFGGDREKNYVLDKKILNSKIKIIRDLDFIDNKNNITNNFIRKFTKIGTNERNRILHAISKERDLQGTQDDYNKVINIIQNLKISDEEVSKALNLDVVFKDKKNIITKINDIKISEENNNDIKYLPSFSKVLPEILNLYRNNPKNEPFDTIETEKIVLNALIYVNKELYKKLILEDDLEENESKNIFLQELKKTLGNIDEIDENIIENYYKNAQISASKGNNKAIKKYQKKVIECYIGYLRKNYEELFDFSDFKMNIQEIKKQIKDINDNKTYERITVKTSDKTIVINDDFEYIISIFALLNSNAVINKIRNRFFATSVWLNTSEYQNIIDILDEIMQLNTLRNECITENWNLNLEEFIQKMKEIEKDFDDFKIQTKKEIFNNYYEDIKNNILTEFKDDINGCDVLEKKLEKIVIFDDETKFEIDKKSNILQDEQRKLSNINKKDLKKKVDQYIKDKDQEIKSKILCRIIFNSDFLKKYKKEIDNLIEDMESENENKFQEIYYPKERKNELYIYKKNLFLNIGNPNFDKIYGLISNDIKMADAKFLFNIDGKNIRKNKISEIDAILKNLNDKLNGYSKEYKEKYIKKLKENDDFFAKNIQNKNYKSFEKDYNRVSEYKKIRDLVEFNYLNKIESYLIDINWKLAIQMARFERDMHYIVNGLRELGIIKLSGYNTGISRAYPKRNGSDGFYTTTAYYKFFDEESYKKFEKICYGFGIDLSENSEINKPENESIRNYISHFYIVRNPFADYSIAEQIDRVSNLLSYSTRYNNSTYASVFEVFKKDVNLDYDELKKKFKLIGNNDILERLMKPKKVSVLELESYNSDYIKNLIIELLTKIENTNDTL

SEQ ID NO: 1136 - protein, 4 aa, Artificial Sequence
  Synthetic sequence
AAAA

SEQ ID NO: 1137 - protein, 4 aa, Artificial Sequence
  Synthetic sequence
AAAA

SEQ ID NO: 1138 - protein, 4 aa, Artificial Sequence
  Synthetic sequence
AAAA

SEQ ID NO: 1139 - protein, 4 aa, Artificial Sequence
  Synthetic sequence
AAAA

SEQ ID NO: 1140 - DNA, 24 bp, Artificial Sequence
  Synthetic sequence
atgcttagaaccgaggtagagttt

SEQ ID NO: 1141 - DNA, 21 bp, Artificial Sequence
  Synthetic sequence
cctgagacttccacactgatg

SEQ ID NO: 1142 - protein, 239 aa, Homo sapiens
MAHAGRTGYDNREIVMKYIHYKLSQRGYEWDAGDVGAAPPGAAPAPGIFSSQPGHTPHPAASRDPVARTSPLQTPAAPGAAAGPALSPVPPVVHLTLRQAGDDFSRRYRRDFAEMSSQLHLTPFTARGRFATVVEELFRDGVNWGRIVAFFEFGGVMCVESVNREMSPLVDNIALWMTEYLNRHLHTWIQDNGGWDAFVELYGPSMRPLFDFSWLSLKTLLSLALVGACITLGAYLGHK

SEQ ID NO: 1143 - protein, 205 aa, Homo sapiens
MAHAGRTGYDNREIVMKYIHYKLSQRGYEWDAGDVGAAPPGAAPAPGIFSSQPGHTPHPAASRDPVARTSPLQTPAAPGAAAGPALSPVPPVVHLTLRQAGDDFSRRYRRDFAEMSSQLHLTPFTARGRFATVVEELFRDGVNWGRIVAFFEFGGVMCVESVNREMSPLVDNIALWMTEYLNRHLHTWIQDNGGWVGALGDVSLG

SEQ ID NO: 1144 - protein, 350 aa, Homo sapiens [sequence omitted]

SEQ ID NO: 1145 - DNA, 82 bp, Homo sapiens
  misc_feature (14)..(14): n is a, c, g, or t
  misc_feature (29)..(29): n is a, c, g, or t
  misc_feature (61)..(61): n is a, c, g, or t
  misc_feature (66)..(67): n is a, c, g, or t
mgatawkdhrstknwgcactrmaaghctndacckgwdddhkkhssgcasvkktgkdrraknkaktnnkkktakkvrraaamd

SEQ ID NO: 1146 - DNA, 332 bp, Homo sapiens
  misc_feature (3)..(3): n is a, c, g, or t
  misc_feature (13)..(13): n is a, c, g, or t
  misc_feature (16)..(16): n is a, c, g, or t
  misc_feature (21)..(21): n is a, c, g, or t
  misc_feature (65)..(65): n is a, c, g, or t
  misc_feature (68)..(68): n is a, c, g, or t
  misc_feature (71)..(71): n is a, c, g, or t
  misc_feature (77)..(77): n is a, c, g, or t
  misc_feature (80)..(80): n is a, c, g, or t
  misc_feature (85)..(85): n is a, c, g, or t
  misc_feature (112)..(112): n is a, c, g, or t
  misc_feature (121)..(121): n is a, c, g, or t
  misc_feature (147)..(147): n is a, c, g, or t
  misc_feature (159)..(159): n is a, c, g, or t
  misc_feature (164)..(165): n is a, c, g, or t
  misc_feature (176)..(177): n is a, c, g, or t
  misc_feature (180)..(180): n is a, c, g, or t
  misc_feature (182)..(182): n is a, c, g, or t
  misc_feature (197)..(197): n is a, c, g, or t
  misc_feature (236)..(237): n is a, c, g, or t
  misc_feature (256)..(256): n is a, c, g, or t
  misc_feature (273)..(273): n is a, c, g, or t
  misc_feature (282)..(282): n is a, c, g, or t
  misc_feature (305)..(305): n is a, c, g, or t
mtnsgsktcvadnkvnrktansgsvsastaragytggdtvrcschaavdrwygdsavgrhrkvsncrngynsatstnsgngykvnygsrdhadrsthadyrtgvvdsdtyrnamysarksnwdyahtrasagyytggdvcccggkknwcdrawshrrhncvgrnnrssdavssdrnnstnrnsmadyartgtwysvnkaragyaggdkvkchcgggtdwksdwhakwygckykgynnhthscvrttktstrrddtnmvarmgskdkkmksgsnyksvvadvnakdsmdsstskstrrkckcmdrnavvcghvtckcaavdkcmcytvtkkms

SEQ ID NO: 1147 - DNA, 404 bp, Artificial Sequence
  Synthetic sequence
  misc_feature (11)..(11): n is a, c, g, or t
  misc_feature (22)..(22): n is a, c, g, or t
  misc_feature (24)..(24): n is a, c, g, or t
  misc_feature (57)..(57): n is a, c, g, or t
  misc_feature (68)..(68): n is a, c, g, or t
  misc_feature (81)..(81): n is a, c, g, or t
  misc_feature (91)..(91): n is a, c, g, or t
  misc_feature (96)..(96): n is a, c, g, or t
  misc_feature (113)..(114): n is a, c, g, or t
  misc_feature (125)..(125): n is a, c, g, or t
  misc_feature (162)..(162): n is a, c, g, or t
  misc_feature (174)..(174): n is a, c, g, or t
  misc_feature (176)..(176): n is a, c, g, or t
  misc_feature (182)..(182): n is a, c, g, or t
  misc_feature (209)..(209): n is a, c, g, or t
  misc_feature (252)..(252): n is a, c, g, or t
  misc_feature (266)..(266): n is a, c, g, or t
  misc_feature (275)..(275): n is a, c, g, or t
  misc_feature (287)..(287): n is a, c, g, or t
  misc_feature (292)..(292): n is a, c, g, or t
  misc_feature (297)..(297): n is a, c, g, or t
  misc_feature (313)..(313): n is a, c, g, or t
  misc_feature (321)..(321): n is a, c, g, or t
  misc_feature (324)..(324): n is a, c, g, or t
  misc_feature (326)..(326): n is a, c, g, or t
  misc_feature (340)..(340): n is a, c, g, or t
  misc_feature (344)..(344): n is a, c, g, or t
  misc_feature (346)..(346): n is a, c, g, or t
  misc_feature (354)..(354): n is a, c, g, or t
  misc_feature (358)..(358): n is a, c, g, or t
mhktasrgsynksmdstsdwtnsnkkmkydscyrmstystagvvsrsaragyytgvndkvkcccgmdnwkgdskhkyscsnvsasgstskntsmrnsahssthsssgsysssnnsravdsssrtnysyamstartyhmwtssaragyyggdrvacacggksnwkddamshrrhncnstrssnsmthaarmrtmywssvvasagyyvgrnddvkcccdggrcwsgddwvhakwrcrmkgvdgryhstsdttgnadhggsssdavmmntvvksamgnrdvktvskttgnyktvndvsanadkrkkamasddsrknrmatcvdnkanvnkhdkktardtvkgnaaanknckdstyknvdknmkytdvsgsrrrtckvcmdkvsvvcghvvccasrkccrgkgtvrts

SEQ ID NO: 1148 - DNA, 157 bp, Artificial Sequence
  Synthetic sequence
  misc_feature (4)..(4): n is a, c, g, or t
  misc_feature (22)..(22): n is a, c, g, or t
  misc_feature (33)..(33): n is a, c, g, or t
  misc_feature (35)..(35): n is a, c, g, or t
  misc_feature (44)..(44): n is a, c, g, or t
  misc_feature (85)..(85): n is a, c, g, or t
  misc_feature (90)..(90): n is a, c, g, or t
  misc_feature (118)..(118): n is a, c, g, or t
  misc_feature (122)..(122): n is a, c, g, or t
  misc_feature (131)..(132): n is a, c, g, or t
  misc_feature (141)..(141): n is a, c, g, or t
mssnrvvdsykskgyswssdvnrtagtsmtsangnswhadsavngatahsssdarvmaavkaragdryrrasdtshtgtaysvvnrdgvnwgrvasggacvsvdkmvvsraawmatyndhwnggwdtvygnnaaasrkgrnrwtgmtvagvvgssrk

What is claimed is:

1. A method of editing a target genomic DNA in a mammalian stem cell, the method comprising:
a) overexpressing an apoptosis regulator in the cell, generating a modified mammalian stem cell that overexpresses the apoptosis regulator; and
b) contacting the modified mammalian stem cell with a genome targeting composition comprising a genome editing endonuclease, or a nucleic acid encoding the genome editing endonuclease, wherein the genome editing endonuclease cleaves within a desired target sequence of the genomic DNA of the cell, wherein the genome-editing endonuclease enters the modified stem cell and edits the target genomic DNA.

2. The method of claim 1, wherein the modification of the genomic DNA is an insertion of a sequence into the genomic DNA and/or a deletion of sequence from the genomic DNA, or where the modification of the genomic DNA is a substitution of one or more nucleotides of the target genomic DNA.

3. The method of claim 1 or claim 2, wherein the genome targeting composition comprises a zinc finger nuclease.

4. The method of claim 1 or claim 2, wherein the genome targeting composition comprises a TAL-effector DNA binding domain-nuclease fusion protein (TALEN).

5. The method of claim 1 or claim 2, wherein the genome targeting composition comprises a ribonucleoprotein (RNP) complex comprising a class 2 CRISPR/Cas endonuclease complexed with a corresponding CRISPR/Cas guide RNA that hybridizes to a target sequence within the genomic DNA of the cell.

6. The method of claim 5, wherein the genome targeting composition comprises:
(i) a nucleic acid encoding a class 2 CRISPR/Cas endonuclease, and
(ii) a corresponding CRISPR/Cas guide RNA, or a nucleic acid encoding the corresponding CRISPR/Cas guide RNA, wherein the CRISPR/Cas guide RNA hybridizes to a target sequence within the genomic DNA of the cell.

7. The method of claim 5 or claim 6, wherein the class 2 CRISPR/Cas endonuclease is a type II CRISPR/Cas endonuclease.

8. The method of claim 5 or claim 6, wherein the class 2 CRISPR/Cas endonuclease is a Cas9 polypeptide and the corresponding CRISPR/Cas guide RNA is a Cas9 guide RNA.

9. The method of claim 5 or claim 6, wherein the class 2 CRISPR/Cas endonuclease is a type V or type VI CRISPR/Cas endonuclease.

10. The method of claim 5 or claim 6, wherein the class 2 CRISPR/Cas polypeptide is a Cpf1 polypeptide, a C2c1 polypeptide, a C2c3 polypeptide, or a C2c2 polypeptide.

11. The method of any one of claims 5-10, wherein the genome targeting composition comprises a donor template nucleic acid.

12. The method of any one of claims 1-11, wherein the apoptosis regulator is Bcl-2, a caspase-9-DN mutant, baculovirus p35, caspase-9S, crmA, z-VAD-fmk, z-DEVD-fmk, B-D-fmk, z-YVAD-fmk, Bcl-xL, Mcl-1, XIAP, TIAP, KIAP, NAIP, cIAP1, cIAP2, API1, API2, API3, API4, HIAP1, HIAP2, MIHA, MIHB, MIHC, ILP, ILP-2, TLAP, survivin, livin, apollon, BRUCE, MLIAP, SODD, or FLIP.

13. The method of any one of claims 1-11, wherein the apoptosis regulator is a Bcl-2 polypeptide.

14. The method of claim 13, wherein the Bcl-2 polypeptide comprises an amino acid sequence having at least 85% amino acid sequence identity to the amino acid sequence set forth in FIG. 1A or FIG. 1B.

15. The method of any one of claims 1-14, wherein the mammalian stem cell is a pluripotent stem cell or an adult stem cell.

16. The method of any one of claims 1-14, wherein the mammalian stem cell is a hematopoietic stem cell, an embryonic stem cell, a neural stem cell, a hematopoietic stem cell, a mesenchymal stem cell, or an induced pluripotent stem cell.

17. The method of any one of claims 1-14, wherein the mammalian stem cell is a hematopoietic stem cell.

18. The method of any one of claim 17, wherein the apoptosis regulator is transiently overexpressed.

19. The method of claim 18, wherein the apoptosis regulator is overexpressed for a period of time of from about 1 hour to about 48 hours.

20. The method of claim 18, wherein the apoptosis regulator is overexpressed for a period of time of from about 48 hours to about 72 hours.

21. The method of any one of claims 1-20, wherein the apoptosis regulator is overexpressed by at least 50% over background.

22. A method of editing a target genomic DNA of a mammalian stem cell, the method comprising:
a) overexpressing an apoptosis regulator in the cell, generating a modified mammalian stem cell that overexpresses the apoptosis regulator; and
b) contacting the modified mammalian stem cell with a ribonucleoprotein (RNP) complex comprising a class 2 CRISPR/Cas endonuclease complexed with a corresponding CRISPR/Cas guide RNA that hybridizes to a target sequence within the genomic DNA of the cell, wherein the class 2 CRISPR/Cas endonuclease cleaves the genomic DNA, resulting in editing of the target genomic DNA.

23. The method of claim 22, wherein the class 2 CRISPR/Cas endonuclease is a type II CRISPR/Cas endonuclease.

24. The method of claim 22, wherein the class 2 CRISPR/Cas endonuclease is a Cas9 polypeptide and the corresponding CRISPR/Cas guide RNA is a Cas9 guide RNA.

25. The method of claim 24, wherein the Cas9 guide RNA is a single guide RNA (sgRNA).

26. The method of claim 22, wherein the class 2 CRISPR/Cas endonuclease is a type V or type VI CRISPR/Cas endonuclease.

27. The method of claim 22, wherein the class 2 CRISPR/Cas polypeptide is a Cpf1 polypeptide, a C2c1 polypeptide, a C2c3 polypeptide, or a C2c2 polypeptide.

28. The method of any one of claims 22-27, wherein the RNP complex is present in a composition that comprises a donor template nucleic acid.

29. The method of any one of 22-28, wherein the apoptosis regulator is Bcl-2, a caspase-9-DN mutant, baculovirus p35, caspase-9S, crmA, z-VAD-fmk, z-DEVD-fmk, B-D-fmk, z-YVAD-fmk, Bcl-xL, Mcl-1, XIAP, TIAP, KIAP, NAIP, cIAP1, cIAP2, API1, API2, API3, API4, HIAP1, HIAP2, MIHA, MIHB, MIHC, ILP, ILP-2, TLAP, survivin, livin, apollon, BRUCE, MLIAP, SODD, or FLIP.

30. The method of any one of claims 22-28, wherein the apoptosis regulator is a Bcl-2 polypeptide.

31. The method of claim 30, wherein the Bcl-2 polypeptide comprises an amino acid sequence having at least 85% amino acid sequence identity to the amino acid sequence set forth in FIG. 1A or FIG. 1B.

32. The method of any one of claims 22-31, wherein the mammalian stem cell is a pluripotent stem cell or an adult stem cell.

33. The method of any one of claims 22-31, wherein the mammalian stem cell is a hematopoietic stem cell, an embryonic stem cell, a neural stem cell, a hematopoietic stem cell, a mesenchymal stem cell, or an induced pluripotent stem cell.

34. The method of any one of claims 22-31, wherein the mammalian stem cell is a hematopoietic stem cell.

35. The method of any one of claim 34, wherein the apoptosis regulator is transiently overexpressed.

36. The method of claim 35, wherein the apoptosis regulator is overexpressed for a period of time of from about 1 hour to about 48 hours.

37. The method of claim 35, wherein the apoptosis regulator is overexpressed for a period of time of from about 48 hours to about 72 hours.

38. The method of any one of claims 22-37, wherein the apoptosis regulator is overexpressed by at least 50% over background.
